(19) United States
(12) Patent Application Publication
(10) Pub. No.: US 2025/0188174 A1
(43) Pub. Date: Jun. 12, 2025

(54) BINDING PROTEINS AND METHODS OF USE THEREOF

(71) Applicant: NGM Biopharmaceuticals, Inc., South San Francisco, CA (US)

(72) Inventors: Wenyan Shen, Redwood City, CA (US); Jie Tang, Palo Alto, CA (US); Yan Wang, Foster City, CA (US); Hugo Matern, San Mateo, CA (US)

(21) Appl. No.: 18/953,778

(22) Filed: Nov. 20, 2024

Related U.S. Application Data
(62) Division of application No. 17/194,144, filed on Mar. 5, 2021, now Pat. No. 12,180,289.
Application No. 17/194,144 is a continuation of application No. 16/129,438, filed on Sep. 12, 2018, now Pat. No. 10,975,154.
Application No. 16/129,438 is a division of application No. 15/449,839, filed on Mar. 3, 2017, now Pat. No. 10,174,119.
(60) Provisional application No. 62/316,516, filed on Mar. 31, 2016.

(51) Int. Cl. C07K 16/28; A61K 39/00; A61K 39/395; C07K 14/475

(52) U.S. Cl. CPC C07K 16/2866; C07K 14/475; C07K 16/2863; A61K 39/395; A61K 39/3955; A61K 2039/505; C07K 2299/00; C07K 2317/24; C07K 2317/30; C07K 2317/34; C07K 2317/55; C07K 2317/76; C07K 2317/92

(57) ABSTRACT

The present disclosure provides binding proteins, such as antibodies, that bind to a GDNF Family Receptor Alpha Like (GFRAL) protein, including human GFRAL protein, and methods of their use.

### CROSS-REFERENCE TO RELATED APPLICATIONS

[0001] This application is a divisional of U.S. patent application Ser. No. 17/194,144, filed Mar. 5, 2021, issued as U.S. Pat. No. 12,180,289, which is a continuation of U.S. application Ser. No. 16/129,438, filed Sep. 12, 2018, issued as U.S. Pat. No. 10,975,154, which is a divisional of U.S. application Ser. No. 15/449,839, filed Mar. 3, 2017, issued as U.S. Pat. No. 10,174,119, which claims the benefit of U.S. Provisional Application No. 62/316,516, filed Mar. 31, 2016, the entire contents of each of which are incorporated herein by reference.

### SEQUENCE LISTING

[0002] This application contains a Sequence Listing that has been submitted electronically as an XML file named “47702-0008004_UPDATEDSL_ST26.XML”. The XML file, created on Dec. 22, 2024, is 1,803,344 bytes in size. The material in the XML file is hereby incorporated by reference in its entirety.

### FIELD

[0003] The present disclosure relates generally to binding proteins, such as antibodies, that bind to a GDNF Family Receptor Alpha Like (GFRAL) protein, including human GFRAL protein, and methods of their use.

### BACKGROUND

[0004] Growth differentiation factor 15 (GDF15) is a protein belonging to the transforming growth factor beta (TGF-β) superfamily. GDF15 is also known as TGF-PL, MIC-1, PDF, PLAB, NAG-1, and PTGFB. GDF15 mRNA is reported to be most abundant in the liver, with lower levels seen in some other tissues. Its expression in liver can be significantly up-regulated in injury of organs such as liver, kidney, heart and lung.

[0005] GDF15 is reported to play a role in regulating inflammatory and apoptotic pathways in injured tissues and during disease processes. It has been reported that GDF15 is a mediator of cachexia in various diseases. However, cachexia is a complex and incompletely understood syndrome. In addition, at least some tumors over-express and secrete GDF15, and elevated serum GDF15 levels have been associated with various cancers. GDF-15 has been described as a negative regulator of macrophage activation by suppressing the release of TNF-α, IL-1, IL-2 and MCS-F, thus inhibiting the positive feedback of local inflammatory signaling similar to the effects of TGF-β. Monoclonal antibodies against GDF15 have been disclosed as potential therapeutic agents for the treatment of cachexia and of cancer. The receptor for GDF15 is unknown.

[0006] There is a significant unmet need for therapeutic agents effective to treat weight loss associated with a number of diseases and conditions, including wasting diseases such as cachexia or sarcopenia and inflammatory conditions such as systemic inflammation or an acute inflammatory response. There is also a significant unmet need for therapeutic agents effective to treat chronic diseases, including cancer, chronic renal disease, chronic obstructive pulmonary disease, AIDS, tuberculosis, chronic inflammatory disease, systemic inflammation, and muscle wasting diseases, including in which involuntary body weight loss and/or muscle mass loss is involved.

### SUMMARY

[0007] The present disclosure provides proteins that bind to a GDNF Family Receptor Alpha Like (GFRAL) protein, including binding proteins such as antibodies that bind to a GFRAL protein. Such binding proteins including antibodies, may bind to a GFRAL polypeptide, a GFRAL fragment and/or a GFRAL epitope. Such binding proteins, including antibodies, may be antagonists (e.g., inhibit binding of a GDF15 protein to a GFRAL protein, inhibit binding of a RET protein to a GFRAL protein, inhibit a GDF15 protein induced signaling, and/or inhibit formation of a GDF15/GFRAL or a GDF15/GFRAL/RET receptor complex).

[0008] The present disclosure also provides binding proteins, including antibodies (e.g., monoclonal antibodies) or fragments thereof, that (i) bind to a GFRAL protein, (ii) inhibit binding of a GDF15 protein to a GFRAL protein, and/or (iii) inhibit binding of a RET protein to a GFRAL protein.

[0009] In some embodiments, the anti-GFRAL antibodies are humanized antibodies that bind to a GFRAL polypeptide, a GFRAL fragment, or a GFRAL epitope. In certain embodiments, an anti-GFRAL antibody comprises a VH CDR1, VH CDR2, VH CDR3, VL CDR1, VL CDR2, and/or VL CDR3 of a monoclonal antibody designated 1C1, 3P10, 12A3, 5F12, 5A20, 8D8, 17J16, 25M22, 2B8, 22N5, 2I23, 6N16, 1B3, 19K19, 2B3, 8C10, 2A9, 24G2, 6G9, 2B11, 1A3, P1B6, P1H8, or P8G4 as described herein, or a humanized variant thereof. In certain embodiments, an anti-GFRAL antibody can further comprise a VH FR1, VH FR2, VH FR3, VH FR4, VL FR1, VL FR2, VL FR3, and/or VL FR4 of a human immunoglobulin amino acid sequence or a variant thereof.

[0010] In some embodiments, a binding protein (e.g., an anti-GFRAL antibody) comprises six CDRs or less than six CDRs. In some embodiments, a binding protein (e.g., an anti-GFRAL antibody) comprises one, two, three, four, five, or six CDRs selected from VH CDR1, VH CDR2, VH CDR3, VL CDR1, VL CDR2, and/or VL CDR3. In some embodiments, a binding protein (e.g., an anti-GFRAL antibody) comprises one, two, three, four, five, or six CDRs selected from VH CDR1, VH CDR2, VH CDR3, VL CDR1, VL CDR2, and/or VL CDR3 of a monoclonal antibody designated as 1C1, 3P10, 12A3, 5F12, 5A20, 8D8, 17J16, 25M22, 2B8, 22N5, 2I23, 6N16, 1B3, 19K19, 2B3, 8C10, 2A9, 24G2, 6G9, 2B11, 1A3, P1B6, P1H8, or P8G4 as described herein, or a humanized variant thereof. In some embodiments, a binding protein (e.g., an anti-GFRAL antibody) further comprises a scaffold region or framework region, including a VH FR1, VH FR2, VH FR3, VH FR4, VL FR1, VL FR2, VL FR3, and/or VL FR4 of a human immunoglobulin amino acid sequence or a variant thereof.

[0011] In some embodiments, the antibody is a humanized antibody, a monoclonal antibody, a recombinant antibody, an antigen binding fragment or any combination thereof. In some embodiments, the antibody is a humanized monoclonal antibody, or antigen binding fragment thereof, that binds to a GFRAL polypeptide (e.g., a cell surface-expressed or soluble GFRAL), a GFRAL fragment, or a GFRAL epitope.

[0012] The present disclosure also provides binding proteins such as anti-GFRAL antibodies (i) that competitively block (e.g., in a dose-dependent manner) an anti-GFRAL antibody provided herein from binding to a GFRAL polypeptide (e.g., a cell surface-expressed or soluble GFRAL), a GFRAL fragment, or a GFRAL epitope and/or (ii) that bind to a GFRAL epitope that is bound by an anti-GFRAL antibody provided herein. In other embodiments, the binding proteins such as anti-GFRAL antibody competitively block (e.g., in a dose-dependent manner) monoclonal antibody 25M22, 3P10, 8D8 or 5F12 described herein or a humanized variant thereof from binding to a GFRAL polypeptide (e.g., a cell surface-expressed or soluble GFRAL protein), a GFRAL fragment, or a GFRAL epitope. In other embodiments, the binding proteins such as anti-GFRAL antibody bind to a GFRAL epitope that is bound (e.g., recognized) by monoclonal antibody 25M22, 3P10, 8D8 or 5F12 described herein or a humanized variant thereof.

[0013] The present disclosure also provides binding proteins, including antibodies or fragments thereof, that (i) bind to an epitope of a GFRAL protein recognized by an antibody comprising a heavy chain variable region having the amino acid sequence of SEQ ID NO: 3, 7, 11, or 15 and a light chain variable region having the amino acid sequence of SEQ ID NO: 4, 8, 12, or 16, respectively; or (ii) compete for the binding to a GFRAL protein with an antibody comprising a heavy chain variable region having the amino acid sequence of SEQ ID NO: 3, 7, 11, or 15 and a light chain variable region having the amino acid sequence of SEQ ID NO: 4, 8, 12, or 16, respectively. In some embodiments, binding proteins, including antibodies or fragments thereof, are provided herein that bind to a region, including an epitope, of one or more amino acids of a GFRAL protein (e.g., a human GFRAL protein). In some embodiments, binding proteins, including antibodies or fragments thereof, bind to a region of a GFRAL protein (e.g., one or more amino acid residues of an extracellular domain) including, for example, those that bind to: (i) domain 1 of a GFRAL protein (e.g., amino acid residues Q20 to S130 of SEQ ID NO: 1797); (ii) domain 2 of a GFRAL protein (e.g., amino acid residues C131 to C210 of SEQ ID NO: 1797); (iii) domain 3 of a GFRAL protein (e.g., amino acid residues C220 to C316 of SEQ ID NO: 1797); or (iv) an extracellular domain of a GFRAL protein (e.g., amino acid residues Q20 to E351 of SEQ ID NO: 1797).

[0014] In some embodiments, binding proteins, including antibodies or fragments thereof, are provided herein that bind to a specific epitope (e.g., one or more amino acid residues) of a GFRAL protein, including, for example, those that bind to: (i) an epitope of a GFRAL protein comprising at least one of (e.g., one or more) amino acid residues SER156, GLN147, LEU148, ALA149, SER150, TYR151, LEU152, LYS153, ALA154, CYS155, PHE174, TYR175, GLU136, ALA137, CYS138, VAL139, GLY140, ASP141, VAL142, VAL143, CYS144, ASN145, ALA146, LEU186, CYS189, CYS191, ALA192, GLN193, SER194, ASP195, ILE196, PRO197, CYS198, GLN199, GLN200, SER201, LYS202, GLU203, ALA204, LEU205, HIS206, SER207, SER130, CYS131, LEU132, GLU133, VAL134, or ALA135 of a GFRAL protein (SEQ ID NO: 1797); (ii) an epitope of a GFRAL protein comprising at least one of (e.g., one or more) amino acid residues LEU132, GLU133, VAL134, ALA135, GLU136, ALA137, CYS138, VAL139, GLY140, ASP141, VAL142, VAL143, CYS144, ASN145, ALA146, GLN147, LEU148, ALA149, SER150, TYR151, PHE174, TYR175, ALA169, ALA170, ILE171, ARG172, PHE173, GLN176, ASN177, ILE178, PRO179, PHE180, ASN181, ILE182, ALA183, GLN184, MET185, LEU186, ALA187, PHE188, or CYS189 of SEQ ID NO: 1797; (iii) an epitope of a GFRAL protein comprising at least one of (e.g., one or more) amino acid residues LEU164, LYS208, VAL212, ASN213, MET214, VAL215, PRO216, PRO217, PRO218, THR219, CYS220, LEU221, VAL223, TRP245, LEU267, CYS269, GLN28, VAL289, GLN290, CYS291, THR292, CYS293, ARG294, THR295, ILE296, THR297, GLN298, SER299, GLU300, GLU301, SER302, LEU303, CYS304, LYS305, ILE306, PHE307, GLN308, HIS309, MET310, LEU311, HIS312, ARG313, LYS314, SER315, CYS316, or PHE317 of SEQ ID NO: 1797; (iv) an epitope of a GFRAL protein comprising at least one of (e.g., one or more) amino acid residues CYS233, ARG234, ARG235, HIS236, TYR237, ARG238, THR239, PHE240, GLN241, SER242, LYS243, CYS244, TRP245, GLN246, ARG247, VAL248, THR249, ARG250, LYS251, CYS252, HIS253, GLU254, ASP255, GLU256, ASN257, CYS258, ILE259, SER260, THR261, LEU262, SER263, LYS264, ASP266, LEU267, THR268, SER272, ASP274, CYS275, ALA278, CYS269, SER270, SER302, LEU303, ILE306, HIS309, LEU311, MET310, SER315, or CYS316 of SEQ ID NO: 1797; (v) an epitope of a GFRAL protein comprising at least one of (e.g., one or more) amino acid residues GLY140, LEU148, ALA149, ALA146, VAL142, ASN145, VAL139, ALA135, GLU136, LEU152, LEU132, SER201, ALA204, LEU205, LYS153, ILE196, PRO197, or GLN200 of SEQ ID NO: 1797; (vi) an epitope of a GFRAL protein comprising at least one of (e.g., one or more) amino acid residues GLU136, ALA137, VAL139, GLY140, ASP141, VAL142, VAL143, CYS144, ASN145, ALA146, GLN147, PHE173, ASN177, ILE178, PRO179, ASN181, ILE182, or MET185 of SEQ ID NO: 1797; (vii) an epitope of a GFRAL protein comprising at least one of (e.g., one or more) amino acid residues GLN298 or GLU301 of SEQ ID NO: 1797; or (viii) an epitope of a GFRAL protein comprising at least one of (e.g., one or more) amino acid residues ARG234, ARG238, GLN241, SER242, LYS243, TRP245, GLN246, THR249, ARG250, LYS251, CYS252, HIS253, ASP255, ASN257, CYS258, SER260, THR261, or LEU262 of SEQ ID NO: 1797. Such antibodies provided above can, in some embodiments, inhibit GDF15-induced signaling and/or signaling or activation of a GFRAL/GDF15 or RET/GFRAL/GDF15 receptor complex, for example, in a cell that expresses a GFRAL protein. Additionally, in some embodiments, the antibody is a monoclonal antibody, for example, a humanized, human or chimeric antibody.

[0015] In some embodiments, the binding proteins such as anti-GFRAL antibodies provided herein are conjugated or recombinantly linked to a diagnostic agent, a detectable agent (e.g., a radioisotope, an enzyme, a fluorescent compound, a bioluminescent compound or a chemiluminescent compound). In some embodiments, the binding proteins such as anti-GFRAL antibodies provided herein are used (e.g., administered) with a therapeutic agent. In some aspects, the therapeutic agent is a drug, including one or more drugs such as an inhibitor of Activin-A, an inhibitor of ActRIIB, an inhibitor of IL-6 or an inhibitor of IL-6R, a ghrelin, a ghrelin mimetic or a GHS-RIa agonist, a SARM, a TNFα inhibitor, an IL-Ia inhibitor, a myostatin inhibitor, a beta-blocker, a melanocortin peptide inhibitor, a melanocortin receptor inhibitor, or an anti-cancer agent.

[0016] In certain embodiments, compositions are provided comprising a binding protein such as an anti-GFRAL antibody described herein. Also provided herein are pharmaceutical compositions comprising a binding protein such as an GFRAL antibody as described herein.

[0017] The present disclosure also provides isolated nucleic acid molecules encoding an immunoglobulin heavy chain, an immunoglobulin light chain, VH region, VL region, VH CDR1, VH CDR2, VH CDR3, VL CDR1, VL CDR2, and/or VL CDR3 of binding proteins (e.g., anti-GFRAL antibodies) that bind to a GFRAL polypeptide, a GFRAL polypeptide fragment, or a GFRAL epitope (e.g., one or more amino acids of a GFRAL protein, including of an extracellular domain of a GFRAL protein). In some embodiments, the nucleic acid molecule encodes a VH region, VL region, VH CDR1, VH CDR2, VH CDR3, VL CDR1, VL CDR2, and/or VL CDR3 of a monoclonal antibody designated as 1C1, 3P10, 12A3, 5F12, 5A20, 8D8, 17J16, 25M22, 2B8, 22N5, 2I23, 6N16, 1B3, 19K19, 2B3, 8C10, 2A9, 24G2, 6G9, 2B11, 1A3, P1B6, P1H8, or P8G4 as described herein, or a humanized variant thereof. In some embodiments, the nucleic acid molecule further encodes a scaffold region or a framework region, including VH FR1, VH FR2, VH FR3, VH FR4, VL FR1, VL FR2, VL FR3, and/or VL FR4 of a human immunoglobulin amino acid sequence or a variant thereof. Also provided herein are vectors and host cells comprising the nucleic acid molecules encoding a binding protein such as anti-GFRAL antibody, as well as methods of producing a binding protein such as an anti-GFRAL antibody by culturing the host cells provided herein under conditions that promote the production of a binding protein such as an anti-GFRAL antibody.

[0018] The present disclosure also provides methods of treating, preventing or alleviating a GFRAL-mediated disease, disorder, or condition, including a GDF15-mediated disease, disorder or condition, (e.g., one or more symptoms) comprising administering to a subject a therapeutically effective amount of a binding protein such as an anti-GFRAL antibody provided herein, including a subject in need thereof, thereby treating, preventing or alleviating the disease, disorder or condition. In some embodiments, the disease, disorder or condition is caused by or otherwise associated with a GDF15 protein (e.g., a human GDF15 protein) and/or a GFRAL protein (e.g., a human GFRAL protein), such as those related to GDF15-induced signaling in a subject. In certain embodiments, the disease, disorder, or condition is treatable by reducing the occurrence, frequency or severity of cachexia, sarcopenia, or muscle wasting, bone wasting or involuntary loss of body weight. In certain embodiments, the disease, disorder, or condition is cachexia. In certain embodiments, the disease, disorder, or condition is a cancer. In certain embodiments, the disease, disorder, or condition is a cardiovascular disease. In certain embodiments, the disease, disorder, or condition is a chronic inflammatory disease (e.g., chronic renal disease, chronic obstructive pulmonary disease). In certain embodiments, the disease, disorder, or condition is a cancer that has decreased sensitivity to (e.g., resistance to) a chemotherapeutic agent (e.g., an anti-tumor antibody such as trastuzumab) that is induced by or related to a GDF15 protein, including elevated levels of GDF15.

[0019] In some embodiments, the disease, disorder or condition is or is related to cachexia, sarcopenia, muscle wasting or loss of muscle mass, bone wasting, involuntary loss of body weight (e.g., body weight loss associated with or due to a disease, disorder, or condition). In some embodiments, the disease, disorder or condition is selected from the group of underlying diseases associated with cachexia including, but are not limited to, cancer, chronic renal disease, chronic obstructive pulmonary disease, AIDS, tuberculosis, chronic inflammatory diseases, sepsis and other forms of systemic inflammation, muscle wasting, such as muscular dystrophy, and the eating disorder known as anorexia nervosa.

[0020] In some embodiments, the methods of treating, preventing or ameliorating include methods of improving body weight gain or reducing body weight loss, or improving muscle mass gain or reducing muscle mass loss. In some embodiments, the methods of treating, preventing or ameliorating result in improved methods of treating cancer, by preventing, minimizing or reducing the occurrence, frequency or severity of cachexia, sarcopenia or muscle wasting, bone wasting or involuntary loss of body weight.

[0021] The present disclosure also provides methods for detecting GFRAL in a sample comprising contacting the sample with a binding protein such as an anti-GFRAL antibody as described herein, that comprises a detectible agent. In certain embodiments, the sample comprises a cell expressing GFRAL on its surface.

[0022] The present disclosure also provides kits comprising a binding protein such as an anti-GFRAL antibody that binds to a GFRAL polypeptide, a GFRAL fragment or a GFRAL epitope as described herein.

### BRIEF DESCRIPTION OF THE FIGURES

[0023] FIG. 1 shows a sequence alignment between various GFRAL proteins. SEQ ID NOS are noted in parenthesis and bold text.

[0024] FIG. 2 shows a sequence alignment between various GDF15 proteins. SEQ ID NOS are noted in parenthesis and bold text.

[0025] FIG. 3 depicts results of an experiment showing binding affinity of exemplary anti-GFRAL antibodies 1C1 and 3P10 for a GFRAL protein.

[0026] FIG. 4A-4B show alignments of VH and VL sequences for exemplary anti-GFRAL antibodies. SEQ ID NOS are noted in parenthesis and bold text.

[0027] FIG. 5A-5F show alignments of VH and VL sequences for exemplary anti-GFRAL antibodies that bind to domain 1 (FIGS. 5A-5B), domain 2 (FIGS. 5C-5D), or domain 3 (FIGS. 5E-5F) of GFRAL. SEQ ID NOS are noted in parenthesis and bold text.

[0028] FIGS. 6A-6B show alignments of VH and VL sequences of humanized 1C1 antibodies. SEQ ID NOS are noted in parenthesis and bold text.

[0029] FIGS. 7A-7B show alignments of VH and VL sequences of humanized 25M22 antibodies. SEQ ID NOS are noted in parenthesis and bold text.

[0030] FIGS. 8A-8B show alignments of VH and VL sequences of humanized 17J16 antibodies. SEQ ID NOS are noted in parenthesis and bold text.

[0031] FIGS. 9A-9B show alignments of VH and VL sequences of humanized 5F12 antibodies. SEQ ID NOS are noted in parenthesis and bold text.

[0032] FIGS. 10A-10B show alignments of VH and VL sequences of humanized 3P10 antibodies. SEQ ID NOS are noted in parenthesis and bold text.

[0033] FIG. 11 depicts results of a receptor antagonist assay using a humanized GFRAL antibody.

[0034] FIG. 12 depicts results for an Elk1 reporter assay showing of humanized antibodies.

[0035] FIGS. 13A-13C depict results of an experiment showing specificity of an exemplary humanized anti-GFRAL antibody.

[0036] FIGS. 14A-14B depict results of an experiment showing anti-GFRAL antibody inhibition of GDF15-induced weight loss in DIO mice. For FIG. 14A, from left to right in the figure, the administered treatment was PBS, 3P10, 1C1, 17J16, 5A20, 25M22, 5F12, and 1MO3, respectively (for d1, d2 and d3, respectively). For FIG. 14B, from left to right in the figure, the administered treatment was PBS, 8D8 and 12A3, respectively (for d1, d2 and d3, respectively).

[0037] FIG. 15 depicts results of an experiment showing anti-GFRAL antibodies in a model of GDF15-induced weight loss.

[0038] FIG. 16 depicts results of an experiment showing the effects of anti-GFRAL antibodies on food intake.

[0039] FIG. 17 depicts results of an experiment showing the effects of anti-GFRAL antibodies on body weight in DIO mice.

[0040] FIG. 18 depicts results of an experiment showing the effects of anti-GFRAL antibodies on food intake in DIO mice.

[0041] FIG. 19 depicts results of an experiment showing the effects of anti-GFRAL antibodies on fat mass.

[0042] FIG. 20 depicts results of an experiment showing the effect of anti-GFRAL antibodies on GDF15-induced loss of body weight and loss of fat and lean mass in DIO mice.

[0043] FIG. 21 depicts results of an experiment showing the effects of anti-GFRAL antibodies on GDF15-induced increase in energy expenditure and GDF15-induced reduction in food intake in DIO mice.

[0044] FIG. 22 depicts results of an experiment showing the effects of anti-GFRAL antibodies on GDF15-induced loss of body weight and loss of fat and lean mass in lean mice.

[0045] FIG. 23 depicts results of an experiment showing the effects anti-GFRAL antibodies on GDF15-induced change in RER and GDF15-induced reduction in food intake in lean mice.

[0046] FIG. 24 depicts results of an experiment showing the effects of of an anti-GFRAL antibody (3P10) on body weight in lean mice.

[0047] FIG. 25 depicts results of an experiment showing the effects of administration of anti-GFRAL antibodies on food intake in lean mice.

[0048] FIGS. 26A-26C depict results of an experiment showing the effects of dietary adenine.

[0049] FIG. 27A depicts results of an experiment showing the effects of dietary adenine.

[0050] FIG. 27B depicts results of an experiment showing the effects of an exemplary an anti-GFRAL antibody (3P10) on mice with chronic kidney damage.

[0051] FIG. 28 depicts results of an experiment showing the effects of an exemplary an anti-GFRAL antibody (3P10) on mice with chronic kidney damage.

[0052] FIG. 29 depicts results of an experiment showing the effects of an exemplary humanized anti-GFRAL antibody (h3P10) of GDF15-induced body weight loss.

[0053] FIG. 30 shows an exemplary crystal of a complex of a GFRAL protein and a GDF15 protein.

[0054] FIG. 31 illustrates an exemplary GFRAL electron density map.

[0055] FIG. 32 shows an exemplary ribbon diagram of a GFRAL/GDF15 complex formed in an asymmetric GFRAL/GDF15 crystal unit. GFRAL protein domains D2 and D3 are indicated as GFRAL D2 and GFRAL D3.

[0056] FIG. 33 shows an exemplary ribbon diagram of a dimer of two GFRAL/GDF15 complexes. The GFRAL protein domains D2 and D3 are indicated as GFRAL D2 and GFRAL D3.

[0057] FIGS. 34A-34B show different surface representations of a dimer of two GFRAL/GDF15 complexes.

[0058] FIG. 35 illustrates GFRAL amino acid residues interacting with GDF15 amino residues.

[0059] FIGS. 36A-36D illustrate a GFRAL/GDF15 interface. The GFRAL protein domains D2 and D3 are indicated as GFRAL D2 and GFRAL D3.

[0060] FIGS. 37A-37B show different aspects of a superposition of a GFRAL protein and GFRα1 depicted as ribbon diagrams.

[0061] FIGS. 38A-38D illustrate different aspects of the interaction of a GFRAL protein with a RET protein in a RET/GFRAL/GDF15 model.

[0062] FIGS. 39A-39B illustrate amino acid residues on the RET protein interface of a GFRAL protein.

[0063] FIG. 40 illustrates exemplary crystals of a complex having a GFRAL protein, a 3P10 Fab and a 25M22 Fab produced under crystallization conditions B11, D11, and H8.

[0064] FIG. 41 illustrates exemplary crystals of a complex having a GFRAL protein, a 8D8 Fab and a 5F12 Fab produced under crystallization conditions C6, E11, and C2.

[0065] FIG. 42 illustrates exemplary electron density maps of 3P10 Fab and 25M22 Fab CDR regions in the crystal structure of a GFRAL/3P10/25M22 Fab complex.

[0066] FIG. 43 illustrates an exemplary electron density of a GFRAL/8D8/5F12 Fab complex.

[0067] FIG. 44 shows an exemplary ribbon diagram of a GFRAL/3P10/25M22 Fab complex formed in an asymmetric GFRAL/3P10/25M22 Fab complex crystal unit.

[0068] FIG. 45 shows alignments of 3P10 Fab and 25M22 Fab CDR sequences (top lines) with GFRAL amino acid residues (bottom lines) that are involved in 3P10 Fab and 25M22 Fab binding. Residues involved in the GFRAL-Fab interaction are boxed. For the 3P10 Fab, amino acid residues Q1 to S120 of SEQ ID NO: 1824 are shown for the Hc and amino acid residues D1 to F120 of SEQ ID NO: 1825 are shown for the Lc. For the 25M22 Fab, amino acid residues Q1 to S120 of SEQ ID NO: 1826 are shown for the Hc.

[0069] FIG. 46 shows a ribbon diagram illustrating the interaction of a GFRAL 3P10 Fab epitope and a 3P10 Fab heavy chain CDR region.

[0070] FIG. 47 shows a ribbon diagram illustrating the interaction of a GFRAL 3P10 Fab epitope and a 3P10 light chain CDR region.

[0071] FIG. 48 shows a ribbon diagram illustrating the interaction of a GFRAL 25M22 epitope and a 25M22 Fab heavy chain CDR region.

[0072] FIG. 49 shows amino acid sequences for a GFRAL protein (residues S130 to N318 of SEQ ID NO: 1797) and 25M22 Fab heavy chain (HC) residues Q1 to P138 and G146 to P225 of SEQ ID NO: 1826 and light chain (LC) residues D1 to E218 of SEQ ID NO: 1827. Residues having grey background and white text indicate core interaction interface amino acids for both the GFRAL protein and the 25M22 Fab. Residues on the Fab HC or LC having grey background with black or white lettering indicate exemplary CDR sequences for the 25M22 Fab.

[0073] FIGS. 50A-50B illustrate core interaction interface amino acid residues on a GFRAL protein and on 25M22 Fab involved in the GFRAL/25M22 Fab interaction.

[0074] FIG. 51 illustrates boundary interaction interface amino acid residues on a GFRAL protein involved in the GFRAL/25M22 Fab interaction.

[0075] FIG. 52 shows exemplary side views of a ribbon diagram illustrating overlapping 25M22 Fab and GDF15 epitopes on a GFRAL protein as space-filled surface models (core interaction interface amino acids).

[0076] FIG. 53 shows a top view of a ribbon diagram illustrating overlapping 25M22 Fab and GDF15 epitopes on a GFRAL protein as space-filled surface models (core interaction interface amino acids).

[0077] FIG. 54 shows amino acid sequences for a GFRAL protein (residues S130 to N318 of SEQ ID NO: 1797) and 3P10 Fab heavy chain (HC) residues Q1 to A130 and G138 to C221 of SEQ ID NO: 1824 and light chain (LC) residues D1 to C218 of SEQ ID NO: 1825. Residues having grey background and white text indicate core interaction interface amino acids for both the GFRAL protein and the 3P10 Fab. Residues on the Fab HC or LC having grey background with black or white lettering indicate exemplary CDR sequences for the 3P10 Fab.

[0078] FIGS. 55A-55B show a ribbon diagram illustrating a crystal structure of a GFRAL/3P10 Fab complex. Interaction interface residues are shown as stick models (FIG. 55A) or space-filled surface models (FIG. 55B).

[0079] FIGS. 56A-56B illustrates interface residues of a GFRAL 3P10 Fab epitope as space-filled surface models in a ribbon diagram of GFRAL. FIG. 56A shows core interaction interface residues and FIG. 56B shows boundary interaction interface residues.

[0080] FIG. 57 illustrates overlapping residues of a GFRAL protein that bind to 3P10 Fab and residues of a GFRALprotein that bind to a RET protein as space-filled surface models on a ribbon diagram of a GFRALprotein.

[0081] FIG. 58 illustrates the combined coverage of boundary interaction interface residues of a GFRAL protein that bind to 3P10 Fab and 25M22 Fab.

[0082] FIG. 59 shows an exemplary ribbon diagram of a GFRAL/8D8/5F12 Fab complex formed in an asymmetric GFRAL/8D8/5F12 Fab complex crystal unit.

[0083] FIG. 60 shows an exemplary ribbon diagram of the 8D8 Fab and 5F12 Fab binding sites on a GFRAL protein. Residues on the GFRAL protein that are important for Fab binding are shown as stick models.

[0084] FIG. 61 shows amino acid sequences for a GFRAL protein (residues S130 to N318 of SEQ ID NO: 1797) and 8D8 Fab heavy chain (HC) residues Q1 to K217 of SEQ ID NO:1828 and light chain (LC) residues D1 to R211 of SEQ ID NO: 1829. Residues having grey background and white text indicate core interaction interface amino acids for both the GFRAL protein and the 8D8 Fab. Residues on the Fab HC or LC having grey background with black or white lettering indicate exemplary CDR sequences for the 8D8 Fab.

[0085] FIGS. 62A, 62B, 62C and 62D illustrate core and boundary amino acid residues in a GFRAL/8D8 Fab interaction interface.

[0086] FIGS. 63A, 63B, 63C and 63D illustrate the core and boundary amino acid residues in a GFRAL/5F12 Fab interaction interface.

[0087] FIG. 64 shows amino acid sequences for a GFRAL (residues S130 to N318 of SEQ ID NO: 1797) and 5F12 Fab heavy chain (HC) residues Q1 to K223 of SEQ ID NO: 1830 and light chain (LC) residues N1 to E217 of SEQ ID NO: 1831. Residues having grey background and white text indicate core interaction interface amino acids for both the GFRAL protein and the 5F12 Fab. Residues on the Fab HC or LC having grey background with black or white lettering indicate exemplary CDR sequences for the 5F12 Fab.

### DETAILED DESCRIPTION

[0088] Binding proteins, such as antibodies that bind a GFRAL protein, including a human GFRAL protein, are provided herein. A unique property of such binding proteins, including antibodies disclosed herein, is their antagonistic nature, including the ability to inhibit an effect of a GDF15 protein and/or to inhibit binding of a GDF15 protein to a GFRAL protein or inhibit binding of a RET protein to a GFRAL protein, including wherein the inhibition of binding reduces (e.g., blocks) GDF15 signaling. Remarkably and specifically, binding proteins such as antibodies to a GFRAL protein disclosed herein (i) bind to a GFRAL protein, (ii) inhibit binding of a GDF15 protein to a GFRAL protein, and/or (iii) inhibit binding of a RET protein to a GFRAL protein, including blocking the formation of a GDF15/GFRAL protein complex or a GDF15/GFRAL/RET protein complex or GDF15 signaling, including, for example, as measured by several in vitro cell-based assays. Such assays may include (1) a ELK1-luciferase reporter assay (see, e.g., Example 3); and/or (2) ERK-phosphorylation assay in U2OS cells (see, e.g., Example 4). Binding proteins such as anti-GFRAL antibodies, as described herein, therefore are expected to inhibit GDF15 activities in vivo (e.g., related to the signaling function of GDF15). This property makes the disclosed binding proteins, including anti-GFRAL antibodies, viable therapeutics for the treatment of a disease, disorder or condition that is caused by or otherwise associated with a GDF15 protein (e.g., a human GDF15 protein) and/or a GFRAL protein (e.g., a human GFRAL protein), such as those related to GDF15-induced signaling in a subject.

[0089] The binding proteins, such as antibodies that bind a GFRAL protein, that are provided herein share the common feature of antagonizing the binding of (i) a GDF15 protein to a GFRAL protein and/or (ii) a RET protein to a GFRAL protein. The anti-GFRAL antibodies provided herein include humanized anti-GFRAL antibodies, including humanized anti-GFRAL antibodies derived from or based on 1C1, 3P10, 12A3, 5F12, 5A20, 8D8, 17J16, 25M22, 2B8, 22N5, 2I23, 6N16, 1B3, 19K19, 2B3, 8C10, 2A9, 24G2, 6G9, 2B11, 1A3, P1B6, P1H8, and/or P8G4 having CDR sequences as described in Tables 1-24 or FIGS. 4-10. Such anti-GFRAL antibodies, including humanized anti-GFRAL antibodies, bind to a specific domain of a GFRAL protein including, for example, those that bind to: (i) domain 1 of a GFRAL protein (e.g., amino acid residues Q20 to S130 of SEQ ID NO: 1797); (ii) domain 2 of a GFRAL protein (e.g., amino acid residues C131 to C210 of SEQ ID NO: 1797); (iii) domain 3 of a GFRAL protein (e.g., amino acid residues C220 to C316 of SEQ ID NO: 1797); or (iv) an extracellular domain of a GFRAL protein (e.g., amino acid residues Q20 to E351 of SEQ ID NO: 1797).

[0090] In some embodiments of the present disclosure, the binding proteins such as anti-GFRAL antibodies may comprise immunoglobulin variable regions which comprise one or more complementary determining regions (CDRs) as described in Tables 1-24. In such binding proteins (e.g., anti-GFRAL antibodies), the CDRs may be joined with one or more scaffold regions or framework regions, which orient(s) the CDR(s) such that the proper antigen binding properties of the CDR(s) is achieved. Such binding proteins, including anti-GFRAL antibodies as described herein, can inhibit (e.g., block) the interaction (i) between a GDF15 protein and a GFRAL protein and/or (ii) between a RET protein and a GFRAL protein. Such binding proteins, including anti-GFRAL antibodies as described herein, can inhibit (e.g., block) GDF15 signaling.

[0091] In some embodiments of the present disclosure, the binding proteins such as anti-GFRAL antibodies bind to: (i) an epitope of a GFRAL protein comprising at least one of (e.g., one or more) amino acid residues SER156, GLN147, LEU148, ALA149, SER150, TYR151, LEU152, LYS153, ALA154, CYS155, PHE174, TYR175, GLU136, ALA137, CYS138, VAL139, GLY140, ASP141, VAL142, VAL143, CYS144, ASN145, ALA146, LEU186, CYS189, CYS191, ALA192, GLN193, SER194, ASP195, ILE196, PRO197, CYS198, GLN199, GLN200, SER201, LYS202, GLU203, ALA204, LEU205, HIS206, SER207, SER130, CYS131, LEU132, GLU133, VAL134, or ALA135 of a GFRAL protein (SEQ ID NO: 1797); (ii) an epitope of a GFRAL protein comprising at least one of (e.g., one or more) amino acid residues LEU132, GLU133, VAL134, ALA135, GLU136, ALA137, CYS138, VAL139, GLY140, ASP141, VAL142, VAL143, CYS144, ASN145, ALA146, GLN147, LEU148, ALA149, SER150, TYR151, PHE174, TYR175, ALA169, ALA170, ILE171, ARG172, PHE173, GLN176, ASN177, ILE178, PRO179, PHE180, ASN181, ILE182, ALA183, GLN184, MET185, LEU186, ALA187, PHE188, or CYS189 of SEQ ID NO: 1797; (iii) an epitope of a GFRAL protein comprising at least one of (e.g., one or more) amino acid residues LEU164, LYS208, VAL212, ASN213, MET214, VAL215, PRO216, PRO217, PRO218, THR219, CYS220, LEU221, VAL223, TRP245, LEU267, CYS269, GLN28, VAL289, GLN290, CYS291, THR292, CYS293, ARG294, THR295, ILE296, THR297, GLN298, SER299, GLU300, GLU301, SER302, LEU303, CYS304, LYS305, ILE306, PHE307, GLN308, HIS309, MET310, LEU311, HIS312, ARG313, LYS314, SER315, CYS316, or PHE317 of SEQ ID NO: 1797; (iv) an epitope of a GFRAL protein comprising at least one of (e.g., one or more) amino acid residues CYS233, ARG234, ARG235, HIS236, TYR237, ARG238, THR239, PHE240, GLN241, SER242, LYS243, CYS244, TRP245, GLN246, ARG247, VAL248, THR249, ARG250, LYS251, CYS252, HIS253, GLU254, ASP255, GLU256, ASN257, CYS258, ILE259, SER260, THR261, LEU262, SER263, LYS264, ASP266, LEU267, THR268, SER272, ASP274, CYS275, ALA278, CYS269, SER270, SER302, LEU303, ILE306, HIS309, LEU311, MET310, SER315, or CYS316 of SEQ ID NO: 1797; (v) an epitope of a GFRAL protein comprising at least one of (e.g., one or more) amino acid residues GLY140, LEU148, ALA149, ALA146, VAL142, ASN145, VAL139, ALA135, GLU136, LEU152, LEU132, SER201, ALA204, LEU205, LYS153, ILE196, PRO197, or GLN200 of SEQ ID NO: 1797; (vi) an epitope of a GFRAL protein comprising at least one of (e.g., one or more) amino acid residues GLU136, ALA137, VAL139, GLY140, ASP141, VAL142, VAL143, CYS144, ASN145, ALA146, GLN147, PHE173, ASN177, ILE178, PRO179, ASN181, ILE182, or MET185 of SEQ ID NO: 1797; (vii) an epitope of a GFRAL protein comprising at least one of (e.g., one or more) amino acid residues GLN298 or GLU301 of SEQ ID NO: 1797; or (viii) an epitope of a GFRAL protein comprising at least one of (e.g., one or more) amino acid residues ARG234, ARG238, GLN241, SER242, LYS243, TRP245, GLN246, THR249, ARG250, LYS251, CYS252, HIS253, ASP255, ASN257, CYS258, SER260, THR261, or LEU262 of SEQ ID NO: 1797. Such antibodies provided above can, in some embodiments, inhibit GDF15-induced signaling and/or signaling or activation of a GFRAL/GDF15 or RET/GFRAL/GDF15 receptor complex, for example, in a cell that expresses a GFRAL protein. Additionally, in some embodiments of the present disclosure, the antibody is a monoclonal antibody, for example, a humanized antibody.

### General Techniques

[0092] Techniques and procedures described or referenced herein include those that are generally well understood and/or commonly employed using conventional methodology by those skilled in the art, such as, for example, the widely utilized methodologies described in Sambrook et al., Molecular Cloning: A Laboratory Manual 3rd. edition (2001) Cold Spring Harbor Laboratory Press, Cold Spring Harbor, N.Y.; Current Protocols in Molecular Biology (F. M. Ausubel, et al. eds., (2003)); Therapeutic Monoclonal Antibodies: From Bench to Clinic, Z. An, ed, Wiley, Hoboken N.J. (2009); Monoclonal Antibodies: Methods and Protocols, M. Albitar, ed., Humana Press, Totawa, N.J. (2010); and Antibody Engineering, 2nd Ed., Vols 1 and 2, Kontermann and Dubel, eds., Springer-Verlag, Heidelberg, 2010.

### Terminology

[0093] Unless described otherwise, all technical and scientific terms used herein have the same meaning as is commonly understood by one of ordinary skill in the art. For purposes of interpreting this specification, the following description of terms will apply and whenever appropriate, terms used in the singular will also include the plural and vice versa. All patents, applications, published applications and other publications are incorporated by reference in their entirety. In the event that any description of terms set forth conflicts with any document incorporated herein by reference, the description of term set forth below shall control.

[0094] The term “GDNF Family Receptor Alpha Like” “growth differentiation factor 15 receptor,” “GFRAL” or “GFRAL protein” and similar terms refers to a polypeptide (“polypeptide,” and “protein” are used interchangeably herein) or any native GFRAL from any vertebrate source, including mammals such as primates (e.g., humans, cynomolgus monkey (cyno)), dogs, and rodents (e.g., mice and rats), unless otherwise indicated, and, in certain embodiments, includes related GFRAL polypeptides, including SNP variants thereof. GFRAL is also known in the art as “C6orf144,” “Chromosome 6 Open reading Frame 144,” BA360D14.1″ “IVF19356,” and “UNQ9356.”

[0095] The amino acid sequence of a full-length precursor human GFRAL is provided below, which includes a signal peptide sequence (underlined and lowercase residues):

(SEQ ID NO: 1797)
mivfiflamglsleneytsQTNNCTYLREQCLRDANGCKHAWRVMEDACNDSDPGDPCKMRN
SSYCNLSIQYLVESNFQFKECLCTDDFYCTVNKLLGKKCINKSDNVKEDKFKWNLTTRS
HHGFKGMWSCLEVAEACVGDVVCNAQLASYLKACSANGNPCDLKQCQAAIRFFYQNI
PFNIAQMLAFCDCAQSDIPCQQSKEALHSKTCAVNMVPPPTCLSVIRSCQNDELCRRH
YRTFQSKCWQRVTRKCHEDENCISTLSKQDLTCSGSDDCKAAYIDILGTVLQVQCTCR
TITQSEESLCKIFQHMLHRKSCFNYPTLSNVKGMALYTRKHANKITLTGFHSPENGEVIY
AAMCMTVTCGILLLVMVKLRTSRISSKARDPSSIQIPGEL

[0096] The amino acid sequence of a mature human GFRAL polypeptide is provided below:

(SEQ ID NO: 1798)
QTNNCTYLREQCLRDANGCKHAWRVMEDACNDSDPGDPCKMRNSSYCNLSIQYLVE
SNFQFKECLCTDDFYCTVNKLLGKKCINKSDNVKEDKFKWNLTTRSHHGFKGMWSCL
EVAEACVGDVVCNAQLASYLKACSANGNPCDLKQCQAAIRFFYQNIPFNIAQMLAFCD
CAQSDIPCQQSKEALHSKTCAVNMVPPPTCLSVIRSCQNDELCRRHYRTFQSKCWQR
VTRKCHEDENCISTLSKQDLTCSGSDDCKAAYIDILGTVLQVQCTCRTITQSEESLCKIF
QHMLHRKSCFNYPTLSNVKGMALYTRKHANKITLTGFHSPFNGEVIYAAMCMTVTCGI
LLLVMVKLRTSRISSKARDPSSIQIPGEL.

[0097] In some embodiments, GFRAL refers to a protein that is at least 55% identical to the amino acid sequence of mature human GFRAL (SEQ ID NO: 1798). Binding proteins, such as anti-GFRAL antibodies as disclosed herein, can bind GFRAL and/or modulate signaling, as described herein. In certain embodiments, antibodies described herein bind to human GFRAL.

[0098] Human GFRAL has an extracellular domain (e.g., residues 20-351 of SEQ ID NO: 1797), a transmembrane domain (e.g., residues 352-371 of SEQ ID NO: 1797) and a cytoplasmic domain (e.g., residues 372-394 of SEQ ID NO: 1797).

[0099] A nucleic acid sequence encoding a precursor GFRAL polypeptide is provided below:

(SEQ ID NO: 1799)
TTATTCTGGACAGTTACTCTTAAGAAAGTTGTCAGAAGAAACGCATCTGCCTTTTTT
TCCAGGTGAACTGCCGTGAGTTGTCCAGCATGATAGTGTTTATTTTCTTGGCTATG
GGGTTAAGCTTGGAAAATGAATACACTTCCCAAACCAATAATTGCACATATTTAAGA
GAGCAATGCTTACGTGATGCAAATGGATGTAAACATGCTTGGAGAGTAATGGAAGA
TGCCTGCAATGATTCAGATCCAGGTGACCCCTGCAAGATGAGGAATTCATCATACT
GTAACCTGAGTATCCAGTACTTAGTGGAAAGCAATTTCCAATTTAAAGAGTGTCTTT
GCACTGATGACTTCTATTGTACTGTGAACAAACTGCTTGGAAAAAAATGTATCAATA
AATCAGATAACGTGAAAGAGGATAAATTCAAATGGAATCTAACTACACGTTCCCATC
ATGGATTCAAAGGGATGTGGTCCTGTTTGGAAGTGGCAGAGGCATGTGTAGGGGA
TGTGGTCTGTAATGCACAGTTGGCCTCTTACCTTAAAGCTTGCTCAGCAAATGGAA
ATCCGTGTGATCTGAAACAGTGCCAAGCAGCCATACGGTTCTTCTATCAAAATATA
CCTTTTAACATTGCCCAGATGTTGGCTTTTTGTGACTGTGCTCAATCTGATATACCT
TGTCAGCAGTCCAAAGAAGCTCTTCACAGCAAGACATGTGCAGTGAACATGGTTCC
ACCCCCTACTTGCCTCAGTGTAATTCGCAGCTGCCAAAATGATGAATTATGCAGGA
GGCACTATAGAACATTTCAGTCAAAATGCTGGCAGCGTGTGACTAGAAAGTGCCAT
GAAGATGAGAATTGCATTAGCACCTTAAGCAAACAGGACCTCACTTGTTCAGGAAG
TGATGACTGCAAAGCTGCTTACATAGATATCCTTGGGACGGTCCTTCAAGTGCAAT
GTACCTGTAGGACCATTACACAAAGTGAGGAATCTTTGTGTAAGATTTTCCAGCAC
ATGCTTCATAGAAAATCATGTTTCAATTATCCAACCCTGTCTAATGTCAAAGGCATG
GCATTGTATACAAGAAAACATGCAAACAAAATCACTTTAACTGGATTTCATTCCCCC
TTCAATGGAGAAGTAATCTATGCTGCCATGTGCATGACAGTCACCTGTGGAATCCT
TCTGTTGGTTATGGTCAAGCTTAGAACTTCCAGAATATCAAGTAAAGCAAGAGATC
CTTCATCGATCCAAATACCTGGAGAACTCTGATTCATTAGGAGTCATGGACCTATAA
CAATCACTCTTTTCTCTGCTTTTCTTCTTTCCTCTTTTCTTCTCTCCTCTCCTCTCCT
CTCTTCTCCTCTCCTCCCCTCCCCTCTCTGTTTCTTTTTCTTTTTCTTTTCTTTTTTGT
GGCGGAGTTTTGCTCTTGTTGCCCAGGCTGCAGTACAATGGCTCAATCTCGGTTCA
CTGCAACCTCTGCCTCCAAGGTTCAAGTGATTTTCCTGCCTCAGCCTTCCCGAGTA
GCTGGGATTACAGGTACCCGCCACCACGCCCAGCTAATTTTTTTGTATTTTTAGTA
GAGATGGGGTTTTGCCAAATTGGCCAGGGTGGTCTCAAACTCCTGACCTCAGGTG
ATCCACCCACCTCGGCCTCCCAAAGTGCTGGGATTACAGGCGTGAGCAACCACGT
CAAGACAACAATCACTTTCTTTAAAGCAAATCCTACAGCTGGTCAACACCCTATTCC
ATCTGTCATCGAGAAAGAAAATGTTAAAATAGACTTAAAAATATTGCTTTGTTACATA
TAATAATATGGCATGATGATGTTATTTTTTTCTTAATACTCAAGAAAAAATATATGGT
GGTATCTTTTACAACACTGGAACAGAAATAAAGTTTCCCTTGAAGGC.

[0100] “GFRAL” as used herein encompasses human GFRAL and variants thereof, including but not limited to orthologs thereof, such as murine GFRAL, rat GFRAL, cyno GFRAL, and the like. GFRAL is not TGFß RII (NCBI Ref. Seqs.: NM_001024847.2 (GI: 133908632); NM_003242.5 (GI: 133908633)) or orthologs thereof. GFRAL is distinct from TGFβ RI (NCBI Ref. Seqs.: NP_001124388.1 (GI: 195963412); NP_004603.1 (GI: 4759226)) or orthologs thereof. In certain embodiments, GFRAL may be a protein having the amino acid sequence that is at least 55%, 60%, 65%, 70%, 75%, 80%, 85%, 90%, 95%, 96%, 97%, 98%, 99% or more identical to SEQ ID NO: 1797. Such exemplary GFRAL proteins include chimpanzee (99%), cynomolgus monkey (92%), giant panda (82%), dog (81%), cat (80%), pig (77%), bovine (75%), mouse (70%), rat (70%), Chinese hamster (65%), and platypus (59%), as shown in FIG. 1.

[0101] An amino acid sequence of a GFRAL protein from cynomolgus monkey (cyno), scientific name Macaca fascicularis, is provided below, which includes a signal peptide sequence (underlined residues):

(SEQ ID NO: 1800)
mivliflalglsleneytsQTNNCTYLREQCLHDANGCKHAWRIMEDACNDSDPGDPCKMNNS
SYCNLSIQYLVESNFRFKECLCTDDFYCTVNKLLGKECVNKSDNMREDKFKWNLTTHS
HHGFKGMWSCLEVAEACVGDVVCNAQLASYLKACSANGNPCDVKHCQAAIRFFYQNI
PFNIAQMLAFCDCSQSDIPCQQSKEALHSKPCALNMVPPPTCLNVIRSCQNDELCRRH
YRTFQSKCWQRVTRKCHEDENCISALSKQDLTCSGSDDCKAAYIDILGTVLQVQCNCR
TITQSEESLCKIFQHMLHRKSCFNYPTLSNVKSMALYTRKHTNKITLTGFQSPFNGEVIY
AAMCMTVTCGILLLVMVKLRTSRISSKARDPSLSQVPGEL.

[0102] An encoding nucleic acid sequence of a cyno GFRAL protein is provided below:

(SEQ ID NO: 1801)
ACCCACCAGAAAGAAGGAGCTCCAGACACATCTGAACGTCTGAAGGAAGAAACTC
CCGACACACCATCTTTAAGAAATGTAACTCTCACTGCGAGGGTATGTGGCTTCATT
CTTGAAGTCAGGGAGACCAAGAACCCACCAATTGCAGGCACACAAGGGGTCCTTA
TTTTATTCAGGTGAACAGCTGTGAGTTGTCCAGCATGATAGTGCTTATTTTCTTGGC
TTTGGGGCTAAGCTTGGAAAATGAATACACTTCCCAAACCAATAATTGCACATATTT
AAGAGAGCAATGCCTACATGATGCAAATGGATGTAAACATGCTTGGAGAATAATGG
AAGATGCCTGCAATGATTCAGATCCAGGTGACCCCTGCAAGATGAATAATTCATCA
TACTGTAACCTGAGTATCCAGTACTTAGTGGAAAGCAATTTCCGATTTAAAGAGTGT
CTTTGCACTGATGACTTCTATTGTACTGTGAACAAACTGCTTGGAAAAGAATGTGTC
AATAAATCAGATAACATGAGAGAGGATAAATTCAAATGGAATCTAACTACACATTCC
CATCATGGATTCAAAGGGATGTGGTCCTGTTTGGAAGTGGCAGAGGCATGTGTAG
GGGATGTGGTCTGTAATGCACAGTTGGCCTCTTACCTTAAAGCTTGCTCAGCAAAT
GGAAATCCGTGTGATGTGAAACACTGCCAAGCAGCCATACGGTTCTTCTATCAAAA
TATACCTTTTAACATTGCCCAGATGTTGGCTTTTTGTGACTGTTCTCAATCTGATATA
CCTTGTCAGCAGTCCAAAGAAGCTCTTCACAGCAAGCCATGTGCACTGAACATGGT
TCCACCCCCTACTTGCCTCAATGTAATTCGCAGCTGCCAAAATGATGAATTATGCA
GGAGGCACTATAGAACATTTCAGTCAAAATGCTGGCAGCGTGTGACTAGAAAGTG
CCATGAAGATGAGAATTGCATTAGCGCCTTAAGCAAACAGGACCTCACATGTTCAG
GAAGTGATGACTGCAAAGCTGCTTACATAGATATCCTTGGGACAGTCCTTCAAGTG
CAATGTAACTGTAGGACCATTACACAAAGTGAGGAATCTTTGTGCAAGATTTTCCA
GCACATGCTTCATAGAAAATCATGTTTCAATTATCCAACCCTGTCTAATGTCAAAAG
CATGGCATTGTATACAAGAAAACATACAAACAAAATCACTTTAACTGGATTTCAGTC
CCCCTTCAATGGAGAAGTAATCTATGCTGCCATGTGCATGACAGTCACCTGTGGAA
TCCTTCTCTTGGTTATGGTCAAGCTTAGAACTTCCAGAATATCAAGTAAAGCAAGAG
ATCCTTCACTGAGCCAAGTACCTGGAGAACTCTGATTCATTAGGAGTCATGGACCC
ATAACAATCACTCCCCTTCCCTTCCCTTCCCTTCCCTTCCCTTCCCTTCCCTTCCCT
TCCCTTCCCTTCC.

[0103] An amino acid sequence of a GFRAL protein from mouse, scientific name Mus musculus, is provided below, which includes a signal peptide sequence (underlined residues):

(SEQ ID NO: 1802)
mlvfiflavtlssenesssQTNDCAHLIQKCLIDANGCEQSWRSMEDTCLTPGDSCKINNSLHC
NLSIQALVEKNFQFKECLCMDDLHCTVNKLFGKKCTNKTDNMEKDNKDKWNLTTTPFY
HGFKQMQSCLEVTEACVGDVVCNAQLALYLKACSANGNLCDVKHCQAAIRFFYQNMP
FNTAQMLAFCDCAQSDIPCQQSKETLHSKPCALNIVPPPTCLSVIHTCRNDELCRTHYR
TFQTECWPHITGKCHEDETCISMLGKQDLTCSGSESCRAAFLGTFGTVLQVPCACRG
VTQAEEHVCMIFQHMLHSKSCFNYPTPNVKDISSYEKKNSKEITLTGFNSFFNGELLYV
WVCMAVTCGILFLVMLKLRIQSEKRDPSSIEIAGGVIIQ.

[0104] An encoding nucleic acid sequence of a mouse GFRAL protein is provided below:

(SEQ ID NO: 1803)
AACAATTGAATTTGAATACAATTAGGAAAGTTCACAGCTCAAAACAAACTGGTGAGG
AACAGCTGACACCAGAAGCTGACTCTAATTGGCTGGCTCTTAGGAAGCAAAACCTT
TACACAGAAACTTCAGTTGGGATGTTGGTTGGTGTCAGTTCATCCGCCTTTCTCCC
AGGGAGACCATCTTGAGTTGTCCAACATGCTAGTGTTCATTTTCCTGGCTGTTACG
TTAAGCTCAGAAAATGAATCCTCTTCCCAAACAAATGATTGTGCACATTTAATACAG
AAATGCTTGATTGATGCAAATGGCTGTGAGCAGTCATGGAGATCAATGGAAGACAC
CTGCCTTACTCCAGGTGACTCCTGCAAGATAAATAATTCACTACATTGTAACCTGAG
TATCCAGGCTTTGGTGGAAAAAAATTTCCAATTTAAAGAGTGTCTTTGTATGGATGA
CCTCCACTGTACAGTAAACAAACTTTTTGGAAAAAAGTGCACCAATAAGACAGATAA
CATGGAAAAGGACAATAAAGATAAATGGAATCTAACTACTACTCCTTTCTATCATGG
ATTCAAACAGATGCAGTCTTGTTTGGAGGTGACAGAGGCGTGTGTAGGGGATGTG
GTTTGTAATGCACAGTTGGCCCTTTACCTTAAAGCATGCTCAGCAAATGGAAATCT
GTGTGATGTGAAACACTGCCAAGCAGCCATACGGTTCTTCTATCAAAATATGCCTT
TTAACACTGCCCAGATGTTGGCTTTTTGTGACTGTGCTCAATCTGATATACCCTGTC
AGCAATCCAAAGAAACTCTTCACAGCAAGCCATGTGCACTGAATATAGTTCCACCC
CCCACTTGCCTCAGTGTAATTCACACTTGCCGAAATGATGAATTATGCAGGACACA
CTACCGAACATTCCAGACAGAATGCTGGCCCCACATAACTGGGAAGTGCCATGAA
GATGAGACCTGCATTAGCATGTTAGGCAAGCAAGACCTTACTTGTTCTGGGAGTGA
GAGCTGCAGGGCTGCCTTCCTAGGAACCTTTGGGACAGTCCTGCAAGTACCCTGT
GCTTGCAGGGGCGTTACACAGGCTGAAGAACACGTGTGCATGATTTTCCAGCACA
TGCTTCATAGCAAATCGTGTTTCAATTACCCAACTCCTAATGTCAAAGACATTTCCT
CATATGAAAAAAAGAATTCAAAAGAAATTACTCTGACTGGATTCAATTCTTTCTTCAA
TGGAGAACTACTCTATGTTGTTGTGTGCATGGCAGTTACCTGTGGAATTCTTTTCTT
GGTGATGCTCAAGTTAAGGATACAAAGTGAAAAAAGAGATCCCTCATCCATCGAAA
TAGCTGGAGGTGTCATCATTCAGTGAGCTGCAGATCACTTACCAACCACATGTCTG
TGTGACTAACCAATGGAAAATTACATTTGCCAATAACGCAATTTAAGATGGATTTGA
CAATATTTAGTCATTATATGTAACAGTGACTGGTACAGTAATATACCACAATGATCA
CAGATCTGTTTTTGTTTTTGTTTTTAATGTTTGAGTAAATACTTGTTGTGGTGTCATA
ACTAGTTGATAACATTTTCTTTAAAGACAACAGGTGTCATGTAAAATGTGACAAATTT
GCTGGAAGACTATCAATCCACATATCAACTTCTATCTTATGGAACTAATCATAATTA
GTGTGTGCAGTTTTCTGAACAAGGTTATAGTTTTCCATTAAGTTGGTAAAATTAAAAT
GCTAAGTAGAATATTGAGTATACTTGTTATTTATATATTCTTACTTAGTGTCCAATCA
TTAAACAAATTGGTAACATTGAACATATTTAGTTAGATGACTGCTTATGAAAATAAGA
ACTGACATCTTACAAATTTTATAATTTAAATAGTATTGAATTTTACTTTTTATTTGGTA
TGTTAAGATTCATAATATATAAAGCAGCTACATTGGTTGAGAAAAGTCAATGGTTAC
TCCAGTAATGATATACTTTGTGAATTTATTTATTTTTGCTAATTAATGATCCTGAATGT
AATCATGATGAAATAAAAAAGACATACTTAAATTGCT.

[0105] An amino acid sequence of a GFRAL protein from rat, scientific name Rattus norvegicus, is provided below, which includes a signal peptide sequence (underlined residues):

(SEQ ID NO: 1804)
mlvfiflavrlssenesssQTNDCAYFMRQCLTDTDGCKQSWRSMEDACLVSGDSCKINNPLP
CNLSIQSLVEKHFQFKGCLCTDDLHCTVNKIFGKKCTNKTDSMKKDNKYKRNLTTPLY
HDTGFKQMQSCLEVTEACVGDVVCNAQLALYLKACTANGNLCDVKHCQAAIRFFYQN
MPFNTAQMLAFCDCAQSDIPCQQSKETLHSKPCALNVVPPPTCLSVIHTCRNDELCRT
YYRTFQTECWPHVAGKCREDETCISMLGKQDLTCSGSDSCRAAYLGTFGTVLQVPCA
CRSITQGEEPLCMAFQHMLHSKSCFNYPTPNVKDISSYERKHSKEITLTGFNSPFSGEL
IYVVVCMVVTSGILSLVMLKLRIPSKKRDPAPIEIAGAVIIQ

[0106] An encoding nucleic acid sequence of a rat GFRAL protein is provided below:

(SEQ ID NO: 1805)
ACAAATGATTGTGCATATTTCATGCGGCAATGCTTGACTGATACAGATGGCTGTAA
GCAGTCATGGAGATCAATGGAAGACGCCTGCCTTGTCTCAGGTGACTCCTGCAAG
ATAAATAATCCATTGCCTTGTAACCTGAGTATCCAGTCTTTGGTGGAAAAACATTTT
CAATTTAAAGGGTGTCTTTGCACTGATGATCTCCACTGTACAGTAAACAAAATTTTT
GGAAAAAAGTGCACCAATAAGACAGATAGCATGAAAAAAGATAATAAATACAAACG
GAATCTAACTACTCCTTTATATCATGATACAGGATTCAAACAGATGCAGTCTTGTTT
GGAAGTGACAGAGGCGTGTGTAGGGGATGTGGTTTGTAATGCACAGTTGGCCCTT
TACCTTAAAGCATGCACAGCAAATGGAAATCTGTGTGATGTGAAACACTGCCAAGC
GGCCATACGGTTCTTCTATCAAAATATGCCTTTTAACACTGCCCAGATGTTGGCTTT
TTGTGACTGTGCTCAATCTGATATACCCTGTCAACAATCCAAAGAAACTCTTCACAG
CAAGCCATGTGCACTGAACGTAGTTCCACCCCCCACTTGCCTCAGTGTAATTCACA
CTTGCCGAAATGATGAATTATGCAGGACATACTACCGAACATTCCAGACAGAATGC
TGGCCCCATGTGGCTGGGAAGTGTCGTGAAGATGAGACCTGCATTAGTATGCTGG
GCAAGCAAGACCTTACTTGTTCTGGGAGTGACAGCTGCAGGGCAGCCTACCTAGG
AACCTTCGGGACAGTCCTTCAGGTGCCGTGTGCTTGCAGAAGCATCACACAGGGT
GAAGAACCCTTGTGCATGGCTTTCCAGCACATGCTTCACAGCAAATCATGTTTCAA
TTACCCAACTCCTAATGTCAAAGACATTTCCTCATATGAAAGAAAGCATTCAAAAGA
AATTACCCTGACTGGATTCAATTCTCCCTTCAGTGGAGAACTAATCTATGTTGTTGT
GTGCATGGTAGTTACCAGCGGGATTCTTTCCTTGGTGATGCTCAAGCTAAGGATAC
CTAGTAAGAAAAGAGACCCCGCGCCCATCGAAATAGCTGGAGCTGTCATCATTCA
GTGA.

[0107] A GFRAL protein or GFRAL also refers to a protein that has one or more alteration in the amino acid residues (e.g., at locations that are not conserved across variants and/or species) while retaining the conserved domains and having a biological activity similar to the naturally-occurring GFRAL. GFRAL may be encoded by nucleic acid sequences that vary in one or more bases from a naturally-occurring DNA sequence but still translate into an amino acid sequence that corresponds to the a naturally-occurring protein due to degeneracy of the genetic code. A GFRAL protein also refers to a protein that differs from the naturally-occurring sequences of GFRAL by one or more conservative substitutions and/or tags and/or conjugates.

[0108] The term “GFRAL” or “GFRAL protein” encompasses “full-length” unprocessed GFRAL as well as any form of GFRAL that results from processing in the cell. The term GFRAL or “GFRAL protein” also includes: allelic variants (e.g., SNP variants); splice variants; isoforms; fragments; derivatives; substitution, deletion, and insertion variants; fusion polypeptides; and interspecies homologs, preferably, which retain GFRAL activity and/or are sufficient to generate an anti-GFRAL immune response. As those skilled in the art will appreciate, an anti-GFRAL antibody provided herein can bind to a GFRAL protein, including a GFRAL polypeptide fragment, a GFRAL antigen, and/or a GFRAL epitope. An epitope may be part of a larger GFRAL antigen, which may be part of a larger GFRAL polypeptide fragment, which, in turn, may be part of a larger GFRAL protein. A GFRAL protein may exist in a native or denatured form. GFRAL proteins described herein may be isolated from a variety of sources, such as from human tissue types or from another source, or prepared by recombinant or synthetic methods. A GFRAL protein may comprise a polypeptide having the same amino acid sequence as a corresponding GFRAL polypeptide derived from nature. GFRAL proteins encompass truncated or secreted forms of a GFRAL polypeptide (e.g., an extracellular domain sequence), variant forms (e.g., alternatively spliced forms) and allelic variants of the polypeptide. GFRAL polypeptides described herein (e.g., human GFRAL) may be isolated from a variety of sources, such as from human tissue types or from another source, or prepared by recombinant or synthetic methods.

[0109] A GFRAL protein can lack at least 5, at least 10, up to at least 50 or more amino acids relative to a naturally-occurring full-length GFRAL polypeptide. For example, the GFRAL protein may not contain the signal sequence based on the amino acid sequence of a naturally-occurring GFRAL polypeptide. A GFRAL protein may also contain the same or similar post-translational modifications as a naturally-occurring GFRAL polypeptide or may not contain a post-translational modification. For example, the protein may have the same or similar glycosylation pattern as those of a naturally-occurring GFRAL polypeptide or may contain no glycosylation. In other embodiments, the GFRL protein includes mutations relative to the sequence of naturally-occurring GFRAL protein that introduce a glycosylation site at a location not present in the naturally-occurring GFRAL protein.

[0110] In certain embodiments, a GFRAL protein may be expressed by a recombinant cell genetically modified to express the GFRAL protein on its cell surface. The cell may be present in a composition that includes an isolated GDF15 protein. In certain cases, the cell may additionally express a RET protein, for example the cell may express a RET protein endogenously without being genetically modified to include an exogenous sequence encoding the RET protein. In other embodiments, the cell may not express detectable levels of a RET protein and may be genetically modified to express a RET protein from an exogenous sequence.

[0111] Also disclosed herein are fragments of a GFRAL protein, such as GFRAL fragments that lack an intracellular domain present in native GFRAL protein, or the intracellular domain and the transmembrane domain present in native GFRAL protein, such as a native GFRAL depicted in FIG. 1. As noted above, a fragment of a GFRAL protein may also lack a signal sequence present in the native GFRAL and may or may not include a heterologous signal sequence. The fragment may lack the intracellular domain present in a native GFRAL protein but include the transmembrane domain.

[0112] The term “GFRAL-extracellular domain” (“GFRAL-ECD”) includes full-length GFRAL ECDs, GFRAL ECD fragments, and GFRAL ECD variants. As used herein, the term “GFRAL ECD” refers to a GFRAL polypeptide with or without a signal peptide that lacks the intracellular and/or transmembrane domains. In some embodiments, a GFRAL ECD refers to a protein having the amino acid sequence that is at least 70% identical to the amino acid sequence of a human full-length GFRAL ECD having the amino acid sequence:

(SEQ ID NO: 1806)
QTNNCTYLREQCLRDANGCKHAWRVMEDACNDSDPGDPCKMRNSSYCNL
SIQYLVESNFQFKECLCTDDFYCTVNKLLGKKCINKSDNVKEDKFKWNL
TTRSHHGFKGMWSCLEVAEACVGDVVCNAQLASYLKACSANGNPCDLKQ
CQAAIRFFYQNIPFNIAQMLAFCDCAQSDIPCQQSKEALHSKTCAVNMV
PPPTCLSVIRSCQNDELCRRHYRTFQSKCWQRVTRKCHEDENCISTLSK
QDLTCSGSDDCKAAYIDILGTVLQVQCTCRTITQSEESLCKIFQHMLHR
KSCFNYPTLSNVKGMALYTRKHANKITLTGFHSPFNGE.

[0113] The term “full-length GFRAL ECD”, as used herein, refers to a GFRAL ECD that extends to the last amino acid of the extracellular domain, and may or may not include an N-terminal signal peptide. However, it is noted that “full-length GFRAL ECD” also encompasses a GFRAL-ECD that is extended by 1, 2, 3, 4, 5, 6, 7, 8, 9, or 10 amino acids on the C-terminus to include amino acids residues of the transmembrane domain provided that the polypeptide is soluble. In other words, such a GFRAL ECD lacks a sufficient length of a transmembrane domain such that it is not anchored into a cell membrane. The phrase “full-length GFRAL ECD” also encompasses a GFRAL-ECD that is extended by 1, 2, 3, 4, 5, 6, 7, 8, 9, or 10 amino acids on the N-terminus to include amino acids residues of the signal peptide. In certain embodiments, a GFRAL ECD refers to a contiguous amino acid sequence that is at least 70%, 75%, 80%, 85%, 90%, 95%, 96%, 97%, 98%, 99% or more identical to a contiguous amino acid sequence depicted in FIG. 1 and lacks at least 30, 33, 35, 40, 45, 50, or 55 amino acids or more at the C-terminus of the GFRAL sequences depicted in FIG. 1.

[0114] A GFRAL ECD is not an ECD of TGFβ RII (Acc. Nos.: NM_001024847.2; NM_003242.5) or orthologs thereof. GFRAL ECD is distinct from ECD of TGFβ RI (Acc. Nos.: NP_001124388.1; NP_004603.1) or orthologs thereof. In certain embodiments, a GFRAL ECD may be a protein having the amino acid sequence that is at least 70%, 75%, 80%, 85%, 90%, 95%, 96%, 97%, 98%, 99% or more identical to SEQ ID NO: 1806.

[0115] As used herein, the term “GFRAL ECD fragment” refers to a GFRAL ECD having one or more residues deleted from the N and/or C terminus of the full-length ECD and that retains the ability to bind to GDF15. In some instances, a GFRAL ECD fragment may or may not include an N-terminal signal peptide. In some instances, a GFRAL ECD fragment is a human GFRAL ECD fragment that lacks 1, 5, 10, 15, 16, 17, 18, or 19 residues present at the N-terminus of the sequence:

(SEQ ID NO: 1807)
MIVFIFLAMGLSLENEYTSQTNNCTYLREQCLRDANGCKHAWRVMEDAC
NDSDPGDPCKMRNSSYCNLSIQYLVESNFQFKECLCTDDFYCTVNKLLG
KKCINKSDNVKEDKFKWNLTTRSHHGFKGMWSCLEVAEACVGDVVCNAQ
LASYLKACSANGNPCDLKQCQAAIRFFYQNIPFNIAQMLAFCDCAQSDI
PCQQSKEALHSKTCAVNMVPPPTCLSVIRSCQNDELCRRHYRTFQSKCW
QRVTRKCHEDENCISTLSKQDLTCSGSDDCKAAYIDILGTVLQVQCTCR
TITQSEESLCKIFQHMLHRKSCFNYPTLSNVKGMALYTRKHANKITLTG
FHSPENGE

[0116] Another exemplary GFRAL ECD fragment comprises the following amino acid sequence, which corresponds to Q20 to C316 of a full-length human precursor GFRAL protein:

(SEQ ID NO: 1808)
QTNNCTYLREQCLRDANGCKHAWRVMEDACNDSDPGDPCKMRNSSYCNL
SIQYLVESNFQFKECLCTDDFYCTVNKLLGKKCINKSDNVKEDKFKWNL
TTRSHHGFKGMWSCLEVAEACVGDVVCNAQLASYLKACSANGNPCDLKQ
CQAAIRFFYQNIPFNIAQMLAFCDCAQSDIPCQQSKEALHSKTCAVNMV
PPPTCLSVIRSCQNDELCRRHYRTFQSKCWQRVTRKCHEDENCISTLSK
QDLTCSGSDDCKAAYIDILGTVLQVQCTCRTITQSEESLCKIFQHMLHR
KSC

[0117] Yet another exemplary GFRAL ECD fragment comprises the following amino acid sequence, which corresponds to W115 to E351 of a full-length human precursor GFRAL protein:

(SEQ ID NO: 1809)
WNLTTRSHHGFKGMWSCLEVAEACVGDVVCNAQLASYLKACSANGNPCD
LKQCQAAIRFFYQNIPFNIAQMLAFCDCAQSDIPCQQSKEALHSKTCAV
NMVPPPTCLSVIRSCQNDELCRRHYRTFQSKCWQRVTRKCHEDENCIST
LSKQDLTCSGSDDCKAAYIDILGTVLQVQCTCRTITQSEESLCKIFQHM
LHRKSCFNYPTLSNVKGMALYTRKHANKITLTGFHSPENGE.

The above exemplary GFRAL ECD fragment was used in various methods as described in the Examples, including to produce a crystal of a complex comprising a GFRAL protein and a GDF15 protein or a GFRAL protein and an exemplary anti-GFRAL antibody.

[0118] Within a GFRAL protein or GFRAL ECD there are three domains-domain 1 (D1), domain 2 (D2) and domain 3 (D3). In some embodiments, the amino acid sequence of an exemplary D1 domain are residues Q20 to S130 of SEQ ID NO: 1797. In some embodiments, the amino acid sequence of an exemplary D2 domain are residues C131 to C210 of SEQ ID NO: 1797. In some embodiments, the amino acid sequence of an exemplary D3 domain are residues C220 to C316 of SEQ ID NO: 1797. Certain properties of a GFRAL protein can be attributed to the activity and/or binding of these domains, including within the ECD. For example, as described herein, amino acid residues within D2 are identified as being core interaction interface amino acids and/or boundary interaction interface amino acids for a GFRAL protein binding to a GDF15 protein. Likewise, as described herein, amino acid residues within D3 are identified as being core interaction interface amino acids and/or boundary interaction interface amino acids for a GFRAL protein binding to a RET protein.

[0119] The term “core interaction interface amino acid” or grammatical equivalent thereof refers to an amino acid residue of a given protein that has at least one atom within less or equal to 4.5 Å from an interacting protein (e.g., an amino acid of a GFRAL protein that interacts with a GDF15 protein or a RET protein). A distance of 4.5 Å allows for atoms within a van der Waals radius plus a possible water-mediated hydrogen bond to form a bond with the interacting protein.

[0120] The term “boundary interaction interface amino acid” or grammatical equivalent thereof refers to an amino acid residue of a given protein that has at least one atom within less than or equal to 5 Å from a core interface amino acid on the given protein (e.g., an amino acid of a GFRAL protein that is within 5 Å of a core interaction interface amino acid of a GFRAL protein that interacts with a GDF15 protein or a RET protein). A distance of less than or equal to 5 Å allows proteins binding to residues less than 5 Å away from core interaction interface amino acids on a given protein to be within the van der Waals radius of an interacting protein.

[0121] As used herein, the term “GFRAL ECD variants” refers to GFRAL ECDs that contain amino acid additions, deletions, or substitutions and that remain capable of binding to GDF15. Such variants may be at least 80%, 85%, 90%, 92%, 95%, 97%, 98%, or 99% identical to a parent GFRAL ECD.

[0122] “Growth differentiation factor 15” or “GDF15,” also known in the art as MIC-1 (macrophage inhibitory cytokine-1), PDF (prostate differentiation factor), PLAB (placental bone morphogenetic protein), NAG-1 (non-steroidal anti-inflammatory drugs (NSAIDs) activated gene), TGF-PL, and PTGFB, is a member of the transforming growth factor β (TGF-β) super-family. GDF15, which is synthesized as a 62 kDa intracellular precursor protein that is subsequently cleaved by a furin-like protease, is secreted as a 25 kDa disulfide-linked protein (see, e.g., Fairlie et al., J. Leukoc. Biol 65:2-5 (1999)). GDF15 mRNA is seen in several tissues, including liver, kidney, pancreas, colon and placenta, and GDF15 expression in liver can be significantly up-regulated during injury of organs such as the liver, kidneys, heart and lungs.

[0123] The GDF15 precursor is a 308 amino acid polypeptide (NCBI Ref. Seq. NP_004855.2; GI: 153792495) containing a 29 amino acid signal peptide, a 167 amino acid pro-domain, and a mature domain of 112 amino acids which is excised from the pro-domain by furin-like proteases.

[0124] An amino acid sequence of a precursor human GDF15 polypeptide is provided below:

(SEQ ID NO: 1810)
MPGQELRTVNGSQMLLVLLVLSWLPHGGALSLAEASRASFPGPSELHSE
DSRFRELRKRYEDLLTRLRANQSWEDSNTDLVPAPAVRILTPEVRLGSG
GHLHLRISRAALPEGLPEASRLHRALFRLSPTASRSWDVTRPLRRQLSL
ARPQAPALHLRLSPPPSQSDQLLAESSSARPQLELHLRPQAARGRRRAR
ARNGDHCPLGPGRCCRLHTVRASLEDLGWADWVLSPREVQVTMCIGACP
SQFRAANMHAQIKTSLHRLKPDTVPAPCCVPASYNPMVLIQKTDTGVSL
QTYDDLLAKDCHCI

Such a 308-amino acid GDF15 polypeptide is referred to as a “full-length” GDF15 polypeptide; a 112-amino acid GDF15 polypeptide (amino acids 197-308 of “full-length” GDF15) is a “mature” GDF15 polypeptide.

[0125] “GDF15” as used herein includes a protein having an amino acid sequence that is at least 65% identical to the amino acid sequence of a mature human GDF15 polypeptide. An amino acid sequence of a mature human GDF15 polypeptide is provided below:

(SEQ ID NO: 1811)
ARNGDHCPLGPGRCCRLHTVRASLEDLGWADWVLSPREVQVTMCIGACP
SQFRAANMHAQIKTSLHRLKPDTVPAPCCVPASYNPMVLIQKTDTGVSL
QTYDDLLAKDCHCI

[0126] The above exemplary mature human GDF15 was used in the various methods described as in the Examples, including to produce a crystal of a complex comprising a GFRAL protein and a GDF15 protein.

[0127] Unless otherwise indicated, the term “GDF15” refers to a 112 amino acid mature human sequence (e.g., SEQ ID NO: 1811). In addition, numerical references to particular GDF15 residues refer to a 112 amino acid mature sequence (e.g., residue 1 is Ala (A), and residue 112 is Ile (I) of SEQ ID NO: 1811). For example, while a GDF15 precursor amino acid sequence predicts three excision sites, resulting in three putative forms of “mature” human GDF15 (e.g., 110, 112 and 115 amino acids), the 112 amino acid mature sequence is accepted as being correct.

[0128] Within the context of the present disclosure, “GDF15” or “GDF15 protein” includes GDF15 orthologs, and modified forms thereof, from other mammalian species, and their use, including mouse (NP_035949; GI: 170784848), chimpanzee (XP_009433302.1; GI: 694973734), orangutan (XP_009251261.1 GI: 686757768), Rhesus monkey (EHH29815; GI: 355703324), giant panda (XP_002912774; GI: 301753921), gibbon (XP_004089328.1; GI: 441627981), guinea pig (XP_003465238; GI: 348558868), ferret (AER98997; GI: 355689945), cow (NP_001193227; GI: 329664989), pig (NP_001167527; GI: 291291599), dog (XP_541938; GI: 57101740) and platypus (Ornithorhynchus anatinus; AFV61279; GI: 410111209). Such exemplary GDF15 proteins are shown in FIG. 2, which includes an alignment of the various exemplary GDF15 proteins. A mature form of human GDF15 has approximately 67% amino acid identity to the mouse ortholog.

[0129] “RET,” also known in the art as Ret Proto-Oncogene, Cadherin-Related Family Member 16, Rearranged During Transfection, RET Receptor Tyrosine Kinase, Cadherin Family Member 12, Proto-Oncogene C-Ret, EC 2.7.10.1, CDHF12, CDHR16, RET51, PTC, Hydroxyaryl-Protein Kinase, RET Transforming Sequence, and Receptor Tyrosine Kinase, is one of the receptor tyrosine kinases, cell-surface molecules that transduce signals for cell growth and differentiation. RET acts as a co-receptor and is known as a primary signaling receptor for glial-cell-line-derived neurotrophic factor (GDNF) ligands (in human, GDNF, artemin, neurturin, and persephin) when bound to members of the GDNF receptor alpha (GFRa) co-receptors. A RET protein (e.g., a RET-ECD) comprises 4 consecutive cadherin-like domains (CLD1-CLD4) followed by a membrane proximal cystine rich domain (CRD). As disclosed herein, a RET protein is a co-receptor with a GFRAL protein and a GDF15 protein (e.g., acting as a co-receptor with a RET protein). A receptor complex, as described herein, includes a GFRAL protein, such as a RET/GFRAL complex, a GFRAL/GDF15 complex, and a RET/GFRAL/GDF15 complex.

[0130] As used herein, “Ret” or “RET” refers to a protein having the amino acid sequence that is at least 75% identical, e.g., 77%, 79%, 80%, 85%, 90%, 95%, 96%, 97%, 98%, 99% or more identical to the amino acid sequence of SEQ ID NO: 1813. RET is distinct from TGFβ RI and TGFβ RII. SEQ ID NO: 1812 is the sequence of a mature human RET9 that lacks a signal peptide:

(SEQ ID NO: 1812)
KVALGLYFSRDAYWEKLYVDQAAGTPLLYVHALRDAPEEVPSFRLGQHLYGTYRTRLH
ENNWICIQEDTGLLYLNRSLDHSSWEKLSVRNRGFPLLTVYLKVFLSPTSLREGECQW
PGCARVYFSFFNTSFPACSSLKPRELCFPETRPSFRIRENRPPGTFHQFRLLPVQFLCP
NISVAYRLLEGEGLPFRCAPDSLEVSTRWALDREQREKYELVAVCTVHAGAREEVVM
VPFPVTVYDEDDSAPTFPAGVDTASAVVEFKRKEDTVVATLRVFDADVVPASGELVRR
YTSTLLPGDTWAQQTFRVEHWPNETSVQANGSFVRATVHDYRLVLNRNLSISENRTM
QLAVLVNDSDFQGPGAGVLLLHFNVSVLPVSLHLPSTYSLSVSRRARRFAQIGKVCVE
NCQAFSGINVQYKLHSSGANCSTLGVVTSAEDTSGILFVNDTKALRRPKCAELHYMVV
ATDQQTSRQAQAQLLVTVEGSYVAEEAGCPLSCAVSKRRLECEECGGLGSPTGRCE
WRQGDGKGITRNFSTCSPSTKTCPDGHCDVVETQDINICPQDCLRGSIVGGHEPGEP
RGIKAGYGTCNCFPEEEKCFCEPEDIQDPLCDELCRTVIAAAVLFSFIVSVLLSAFCIHC
YHKFAHKPPISSAEMTFRRPAQAFPVSYSSSGARRPSLDSMENQVSVDAFKILEDPKW
EFPRKNLVLGKTLGEGEFGKVVKATAFHLKGRAGYTTVAVKMLKENASPSELRDLLSE
FNVLKQVNHPHVIKLYGACSQDGPLLLIVEYAKYGSLRGFLRESRKVGPGYLGSGGSR
NSSSLDHPDERALTMGDLISFAWQISQGMQYLAEMKLVHRDLAARNILVAEGRKMKIS
DFGLSRDVYEEDSYVKRSQGRIPVKWMAIESLFDHIYTTQSDVWSFGVLLWEIVTLGG
NPYPGIPPERLFNLLKTGHRMERPDNCSEEMYRLMLQCWKQEPDKRPVFADISKDLE
KMMVKRRDYLDLAASTPSDSLIYDDGLSEEETPLVDCNNAPLPRALPSTWIENKLYGRI
SHAFTRF

[0131] The amino acid sequence of a full-length precursor human RET protein is provided below, which includes a signal peptide sequence (underlined and lowercase residues):

(SEQ ID NO: 1813)
makatsgaaglrlllllllpllgkvalgLYFSRDAYWEKLYVDQAAGTPLLYVHALRDAPEEVPSFRLG
QHLYGTYRTRLHENNWICIQEDTGLLYLNRSLDHSSWEKLSVRNRGFPLLTVYLKVFLS
PTSLREGECQWPGCARVYFSFFNTSFPACSSLKPRELCFPETRPSFRIRENRPPGTFH
QFRLLPVQFLCPNISVAYRLLEGEGLPFRCAPDSLEVSTRWALDREQREKYELVAVCT
VHAGAREEVVMVPFPVTVYDEDDSAPTFPAGVDTASAVVEFKRKEDTWVATLRVFDA
DVVPASGELVRRYTSTLLPGDTWAQQTFRVEHWPNETSVQANGSFVRATVHDYRLVL
NRNLSISENRTMQLAVLVNDSDFQGPGAGVLLLHFNVSVLPVSLHLPSTYSLSVSRRA
RRFAQIGKVCVENCQAFSGINVQYKLHSSGANCSTLGVVTSAEDTSGILFVNDTKALR
RPKCAELHYMVVATDQQTSRQAQAQLLVTVEGSYVAEEAGCPLSCAVSKRRLECEEC
GGLGSPTGRCEWRQGDGKGITRNFSTCSPSTKTCPDGHCDVVETQDINICPQDCLRG
SIVGGHEPGEPRGIKAGYGTCNCFPEEEKCFCEPEDIQDPLCDELCRTVIAAAVLFSFIV
SVLLSAFCIHCYHKFAHKPPISSAEMTFRRPAQAFPVSYSSSGARRPSLDSMENQVSV
DAFKILEDPKWEFPRKNLVLGKTLGEGEFGKVVKATAFHLKGRAGYTTVAVKMLKENA
SPSELRDLLSEFNVLKQVNHPHVIKLYGACSQDGPLLLIVEYAKYGSLRGFLRESRKVG
PGYLGSGGSRNSSSLDHPDERALTMGDLISFAWQISQGMQYLAEMKLVHRDLAARNIL
VAEGRKMKISDFGLSRDVYEEDSYVKRSQGRIPVKWMAIESLFDHIYTTQSDVWSFGV
LLWEIVTLGGNPYPGIPPERLFNLLKTGHRMERPDNCSEEMYRLMLQCWKQEPDKRP
VFADISKDLEKMMVKRRDYLDLAASTPSDSLIYDDGLSEEETPLVDCNNAPLPRALPST
WIENKLYGRISHAFTRF

[0132] Accordingly, “RET” or a “RET protein” as used herein encompasses human RET and variants thereof, including but not limited to orthologs thereof, such as murine RET, cyno RET, and the like. In certain embodiments, RET may be a protein having the amino acid sequence that is at least 75%, 80%, 85%, 90%, 95%, 96%, 97%, 98%, 99% or more identical to SEQ ID NO: 1813.

[0133] In certain embodiments, an isolated RET-extracellular domain (RET-ECD) polypeptide is provided. A RET-ECD may be bound to a ligand such as a GFRAL protein when present in an isolated protein complex of the present disclosure. The term “RET-extracellular domain” (“RET-ECD”) includes full-length RET ECDs, RET ECD fragments, and RET ECD variants. As used herein, the term “RET ECD” refers to a RET polypeptide with or without a signal peptide that lacks the intracellular and transmembrane domains. In some embodiments, a RET ECD refers to a protein having an amino acid sequence that is at least 75% identical to the amino acid sequence of human full-length RET ECD having the amino acid sequence:

(SEQ ID NO: 1814)
KVALGLYFSRDAYWEKLYVDQAAGTPLLYVHALRDAPEEVPSFRLGQHLYGTYRTRLH
ENNWICIQEDTGLLYLNRSLDHSSWEKLSVRNRGFPLLTVYLKVFLSPTSLREGECQW
PGCARVYFSFFNTSFPACSSLKPRELCFPETRPSFRIRENRPPGTFHQFRLLPVQFLCP
NISVAYRLLEGEGLPFRCAPDSLEVSTRWALDREQREKYELVAVCTVHAGAREEVVM
VPFPVTVYDEDDSAPTFPAGVDTASAVVEFKRKEDTVVATLRVFDADVVPASGELVRR
YTSTLLPGDTWAQQTFRVEHWPNETSVQANGSFVRATVHDYRLVLNRNLSISENRTM
QLAVLVNDSDFQGPGAGVLLLHFNVSVLPVSLHLPSTYSLSVSRRARRFAQIGKVCVE
NCQAFSGINVQYKLHSSGANCSTLGVVTSAEDTSGILFVNDTKALRRPKCAELHYMVV
ATDQQTSRQAQAQLLVTVEGSYVAEEAGCPLSCAVSKRRLECEECGGLGSPTGRCE
WRQGDGKGITRNFSTCSPSTKTCPDGHCDVVETQDINICPQDCLRGSIVGGHEPGEP
RGIKAGYGTCNCFPEEEKCFCEPEDIQDPLCDELCR

[0134] In another exemplary embodiment, the a RET ECD refers to a protein having a amino acid sequence that is at least 75% identical to the amino acid sequence of a human full-length RET ECD having the amino acid sequence:

(SEQ ID NO: 1815)
LYFSRDAYWEKLYVDQAAGTPLLYVHALRDAPEEVPSFRLGQHLYGTYRTRLHENNWI
CIQEDTGLLYLNRSLDHSSWEKLSVRNRGFPLLTVYLKVFLSPTSLREGECQWPGCAR
VYFSFFNTSFPACSSLKPRELCFPETRPSFRIRENRPPGTFHQFRLLPVQFLCPNISVA
YRLLEGEGLPFRCAPDSLEVSTRWALDREQREKYELVAVCTVHAGAREEVVMVPFPV
TVYDEDDSAPTFPAGVDTASAVVEFKRKEDTVVATLRVFDADVVPASGELVRRYTSTL
LPGDTWAQQTFRVEHWPNETSVQANGSFVRATVHDYRLVLNRNLSISENRTMQLAVL
VNDSDFQGPGAGVLLLHFNVSVLPVSLHLPSTYSLSVSRRARRFAQIGKVCVENCQAF
SGINVQYKLHSSGANCSTLGVVTSAEDTSGILFVNDTKALRRPKCAELHYMVVATDQQ
TSRQAQAQLLVTVEGSYVAEEAGCPLSCAVSKRRLECEECGGLGSPTGRCEWRQGD
GKGITRNFSTCSPSTKTCPDGHCDVVETQDINICPQDCLRGSIVGGHEPGEPRGIKAG
YGTCNCFPEEEKCFCEPEDIQDPLCDELCR

[0135] The term “full-length RET ECD”, as used herein, refers to a RET ECD that extends to the last amino acid of an extracellular domain, and may or may not include an N-terminal signal peptide. However, it is noted that “full-length RET ECD” also encompasses a RET-ECD that is extended by 1, 2, 3, 4, 5, 6, 7, 8, 9, or 10 amino acids on the C-terminus to include amino acids residues of the transmembrane domain provided that the polypeptide is soluble. In other words, a RET ECD lacks a sufficient length of a transmembrane domain such that it is not anchored into a cell membrane. The phrase “full-length RET ECD” also encompasses a RET-ECD that is extended by 1, 2, 3, 4, 5, 6, 7, 8, 9, or 10 amino acids on the N-terminus to include amino acids residues of the signal peptide. In certain embodiments, RET fragment refers to a contiguous amino acid sequence that is at least 70%, 75%, 80%, 85%, 90%, 95%, 96%, 97%, 98%, 99% or more identical to a contiguous amino acid sequence of RET described herein and lacks at least 30, 33, 35, 40, 45, 50, or 55 amino acids or more at the C-terminus of RET sequences described herein.

[0136] As used herein, the term “RET ECD fragment” refers to a RET ECD having one or more residues deleted from the N and/or C terminus of a full-length ECD and that retains the ability to bind to a GFRAL protein. In some instances, a RET ECD fragment may or may not include an N-terminal signal peptide. In some instances, a RET ECD fragment is a human RET ECD fragment that lacks 1, 5, 10, 15, 16, 17, 18, or 19 residues present at the N-terminus of the sequence:

(SEQ ID NO: 1816)
LYFSRDAYWEKLYVDQAAGTPLLYVHALRDAPEEVPSFRLGQHLYGTYRTRLHENNWI
CIQEDTGLLYLNRSLDHSSWEKLSVRNRGFPLLTVYLKVFLSPTSLREGECQWPGCAR
VYFSFFNTSFPACSSLKPRELCFPETRPSFRIRENRPPGTFHQFRLLPVQFLCPNISVA
YRLLEGEGLPFRCAPDSLEVSTRWALDREQREKYELVAVCTVHAGAREEVVMVPFPV
TVYDEDDSAPTFPAGVDTASAVVEFKRKEDTVVATLRVFDADVVPASGELVRRYTSTL
LPGDTWAQQTFRVEHWPNETSVQANGSFVRATVHDYRLVLNRNLSISENRTMQLAVL
VNDSDFQGPGAGVLLLHFNVSVLPVSLHLPSTYSLSVSRRARRFAQIGKVCVENCQAF
SGINVQYKLHSSGANCSTLGVVTSAEDTSGILFVNDTKALRRPKCAELHYMVVATDQQ
TSRQAQAQLLVTVEGSYVAEEAGCPLSCAVSKRRLECEECGGLGSPTGRCEWRQGD
GKGITRNFSTCSPSTKTCPDGHCDVVETQDINICPQDCLRGSIVGGHEPGEPRGIKAG
YGTCNCFPEEEKCFCEPEDIQDPLCDELCR

[0137] The above exemplary RET ECD fragment was used in various methods described in the Examples, including to produce a model of a complex comprising a RET protein, a GFRAL protein and a GDF15 protein.

[0138] In alternative embodiments of a RET ECD, the RET-ECD comprises a C64R, N75Q, N166Q, or C183S mutation in a RET ECD sequence of human full-length RET ECD SEQ ID NO 1814.

[0139] The phrase “modulates the activity and/or signaling,” when applied to a binding protein, such an antibody that binds to GFRAL of the present disclosure, means that the binding protein (e.g., antibody) mimics or modulates an in vitro or an in vivo biological effect induced by the binding of: (i) a GFRAL protein; (ii) a GDF15 protein and a GFRAL protein; or (iii) a GDF15 protein, a GFRAL protein, and a RET protein. In assessing the binding and specificity of anti-GFRAL antibody, for example, an antibody or fragment thereof, that binds to a GFRAL protein (e.g., a human GFRAL protein), is deemed to induce a biological response when the response is equal to or less than 95%, and preferably equal to or less than 10%, 15%, 20%, 25%, 30%, 35%, 40%, 45%, 50%, 55%, 60%, 65%, 70%, 75%, 80%, 85%, 90% or 95%, of the activity of a wild type GFRAL standard (e.g., the mature form of a human GFRAL protein). An antibody or fragment thereof, that binds to GFRAL (e.g., human GFRAL), is also deemed to induce a biological response when it has one or more of the following properties: exhibiting an efficacy level of equal to or less than 95% of a GFRAL standard, with an IC50 of equal to or less than 100 nM, e.g., 90 nM, 80 nM, 70 nM, 60 nM, 50 nM, 40 nM, 30 nM, 20 nM, 10 nM, 1 nM, 0.1 nM 0.01 nM in (1) a ELK1-luciferase reporter assay (see, e.g., Example 3); or (2) ERK-phosphorylation assay in U2OS cells (see, e.g., Example 4).

[0140] The term “binding protein” refers to a protein comprising a portion (e.g., one or more binding regions such as CDRs) that binds to a GFRAL protein, including a human GFRAL protein and, optionally, a scaffold or framework portion (e.g., one or more scaffold or framework regions) that allows the binding portion to adopt a conformation that promotes binding of the binding protein to a GFRAL polypeptide, fragment or epitope. Examples of such binding proteins include antibodies, such as a human antibody, a humanized antibody; a chimeric antibody; a recombinant antibody; a single chain antibody; a diabody; a triabody; a tetrabody; a Fab fragment; a F(ab′) 2 fragment; an IgD antibody; an IgE antibody; an IgM antibody; an IgG1 antibody; an IgG2 antibody; an IgG3 antibody; or an IgG4 antibody, and fragments thereof. The binding protein can comprise, for example, an alternative protein scaffold or artificial scaffold with grafted CDRs or CDR derivatives. Such scaffolds include, but are not limited to, antibody-derived scaffolds comprising mutations introduced to, for example, stabilize the three-dimensional structure of the binding protein as well as wholly synthetic scaffolds comprising, for example, a biocompatible polymer. See, e.g., Korndorfer et al., 2003, Proteins: Structure, Function, and Bioinformatics, 53 (1): 121-129 (2003); Roque et al., Biotechnol. Prog. 20:639-654 (2004). In addition, peptide antibody mimetics (“PAMs”) can be used, as well as scaffolds based on antibody mimetics utilizing fibronectin components as a scaffold. In the context of the present disclosure, a binding protein is said to specifically bind or selectively bind to GFRAL, for example, when the dissociation constant (K_{D}) is ≤10⁻⁸ M. The binding protein (e.g., antibody) may specifically bind GFRAL with high affinity when the K_{D} is ≤10⁻⁹ M or K_{D} is ≤10⁻¹⁰ M. In some embodiments, the binding proteins (e.g., antibodies) may bind to GFRAL, including with a K_{D} of between about 10⁻⁷ M and about 10⁻¹² M and in other embodiments, the binding proteins (e.g., antibodies) may bind with a K_{D} of 1-2×10⁻⁹ M.

[0141] The term “antibody” and “immunoglobulin” or “Ig” are used interchangeably herein, and is used in the broadest sense and specifically covers, for example, individual anti-GFRAL monoclonal antibodies (including agonist, antagonist, neutralizing antibodies, full length or intact monoclonal antibodies), anti-GFRAL antibody compositions with polyepitopic or monoepitopic specificity, polyclonal or monovalent antibodies, multivalent antibodies, multispecific antibodies (e.g., bispecific antibodies so long as they exhibit the desired biological activity), formed from at least two intact antibodies, single chain anti-GFRAL antibodies, and fragments of anti-GFRAL antibodies, as described below. An antibody can be human, humanized, chimeric and/or affinity matured as well as an antibody from other species, for example mouse, rabbit etc. The term “antibody” is intended to include a polypeptide product of B cells within the immunoglobulin class of polypeptides that is able to bind to a specific molecular antigen and is composed of two identical pairs of polypeptide chains, wherein each pair has one heavy chain (about 50-70 kDa) and one light chain (about 25 kDa) and each amino-terminal portion of each chain includes a variable region of about 100 to about 130 or more amino acids and each carboxy-terminal portion of each chain includes a constant region (See, Borrebaeck (ed.) (1995) Antibody Engineering, Second Ed., Oxford University Press.; Kuby (1997) Immunology, Third Ed., W.H. Freeman and Company, New York). In specific embodiments, the specific molecular antigen can be bound by an antibody provided herein includes a GFRAL polypeptide, GFRAL fragment or GFRAL epitope. Antibodies also include, but are not limited to, synthetic antibodies, monoclonal antibodies, recombinantly produced antibodies, multispecific antibodies (including bi-specific antibodies), human antibodies, humanized antibodies, camelized antibodies, chimeric antibodies, intrabodies, anti-idiotypic (anti-Id) antibodies, and functional fragments (e.g., antigens-binding fragments such as GFRAL binding fragments) of any of the above, which refers a portion of an antibody heavy or light chain polypeptide that retains some or all of the binding activity of the antibody from which the fragment was derived. Non-limiting examples of functional fragments (e.g., antigens-binding fragments such as GFRAL binding fragments) include single-chain Fvs (scFv) (e.g., including monospecific, bispecific, etc.), Fab fragments, F(ab′) fragments, F(ab)2 fragments, F(ab′)2 fragments, disulfide-linked Fvs (sdFv), Fd fragments, Fv fragments, diabody, triabody, tetrabody and minibody. In particular, antibodies provided herein include immunoglobulin molecules and immunologically active portions of immunoglobulin molecules, for example, antigen binding domains or molecules that contain an antigen-binding site that binds to a GFRAL antigen (e.g., one or more complementarity determining regions (CDRs) of an anti-GFRAL antibody). Such antibody fragments can be found described in, for example, Harlow and Lane, Antibodies: A Laboratory Manual, Cold Spring Harbor Laboratory, New York (1989); Myers (ed.), Molec. Biology and Biotechnology: A Comprehensive Desk Reference, New York: VCH Publisher, Inc.; Huston et al., Cell Biophysics, 22:189-224 (1993); Plückthun and Skerra, Meth. Enzymol., 178:497-515 (1989) and in Day, E. D., Advanced Immunochemistry, Second Ed., Wiley-Liss, Inc., New York, NY (1990). The antibodies provided herein can be of any type (e.g., IgG, IgE, IgM, IgD, IgA and IgY), any class (e.g., IgG1, IgG2, IgG3, IgG4, IgA1 and IgA2), or any subclass (e.g., IgG2a and IgG2b) of immunoglobulin molecule. Anti-GFRAL antibodies may be agonistic antibodies or antagonistic antibodies. Antibodies provided herein include antagonistic antibodies to GFRAL, for example, antibodies that inhibit GFRAL signaling. Exemplary anti-GFRAL antibodies include antibodies with CDRs as shown in Tables 1-24.

[0142] The terms “about” or “approximately” mean within 20%, within 15%, within 10%, within 9%, within 8%, within 7%, within 6%, within 5%, within 4%, within 3%, within 2%, within or 1% or less of a given value or range.

[0143] An “antigen” is a predetermined antigen to which an antibody can selectively bind. A target antigen may be a polypeptide, carbohydrate, nucleic acid, lipid, hapten or other naturally occurring or synthetic compound. In some embodiments, the target antigen is a polypeptide.

[0144] The term “antigen binding fragment,” “antigen binding domain,” “antigen binding region,” and similar terms refer to that portion of an antibody which comprises the amino acid residues that interact with an antigen and confer on the binding agent its specificity and affinity for the antigen (e.g., the complementarity determining regions (CDRs)).

[0145] The terms “binds” or “binding” refer to an interaction (e.g., covalent or non-covalent) between molecules including, for example, to form a complex. A complex can also include the binding of two or more molecules held together by covalent or non-covalent bonds, interactions or forces. Interactions can be, for example, non-covalent interactions including hydrogen bonds, ionic bonds, hydrophobic interactions, and/or van der Waals interactions. The strength of the total non-covalent interactions between a single antigen-binding site on an antibody and a single epitope of a target molecule, such as GFRAL, is the affinity of the antibody or functional fragment for that epitope. The ratio of association (k1) to dissociation (k−1) of an antibody to a monovalent antigen (k1/k−1) is the association constant K, which is a measure of affinity. The value of K varies for different complexes of antibody and antigen and depends on both k1 and k−1. The association constant K for an antibody provided herein can be determined using any method provided herein or any other method well known to those skilled in the art. The affinity at one binding site does not always reflect the true strength of the interaction between an antibody and an antigen. When complex antigens containing multiple, repeating antigenic determinants, such as a polyvalent GFRAL, come in contact with antibodies containing multiple binding sites, the interaction of antibody with antigen at one site will increase the probability of a reaction at a second site. The strength of such multiple interactions between a multivalent antibody and antigen is called the avidity. The avidity of an antibody can be a better measure of its binding capacity than is the affinity of its individual binding sites. For example, high avidity can compensate for low affinity as is sometimes found for pentameric IgM antibodies, which can have a lower affinity than IgG, but the high avidity of IgM, resulting from its multivalence, enables it to bind antigen effectively.

[0146] The terms “antibodies that specifically bind to GFRAL,” “antibodies that specifically bind to a GFRAL epitope,” and analogous terms are also used interchangeably herein and refer to antibodies that specifically bind to a GFRAL polypeptide, such as a GFRAL antigen, or fragment, or epitope (e.g., human GFRAL such as a human GFRAL polypeptide, antigen or epitope). An antibody that specifically binds to GFRAL, (e.g., human GFRAL) may bind to the extracellular domain or peptide derived from the extracellular domain of GFRAL. An antibody that specifically binds to a GFRAL antigen (e.g., human GFRAL) may be cross-reactive with related antigens (e.g., cyno GFRAL). In certain embodiments, an antibody that specifically binds to a GFRAL antigen does not cross-react with other antigens. An antibody that specifically binds to a GFRAL antigen can be identified, for example, by immunoassays, Biacore, or other techniques known to those of skill in the art. An antibody binds specifically to a GFRAL antigen when it binds to a GFRAL antigen with higher affinity than to any cross reactive antigen as determined using experimental techniques, such as radioimmunoassays (RIA) and enzyme linked immunosorbent assays (ELISAs). Typically a specific or selective reaction will be at least twice background signal or noise and may be more than 10 times background. See, e.g., Paul, ed., 1989, Fundamental Immunology Second Edition, Raven Press, New York at pages 332 336 for a discussion regarding antibody specificity. An antibody “which binds” an antigen of interest (e.g., a target antigen such as GFRAL) is one that binds the antigen with sufficient affinity such that the antibody is useful as a therapeutic agent in targeting a cell or tissue expressing the antigen, and does not significantly cross-react with other proteins. In such embodiments, the extent of binding of the antibody to a “non-target” protein will be less than about 10% of the binding of the antibody to its particular target protein, for example, as determined by fluorescence activated cell sorting (FACS) analysis or radioimmunoprecipitation (RIA). With regard to the binding of an antibody to a target molecule, the term “specific binding” or “specifically binds to” or is “specific for” a particular polypeptide or an epitope on a particular polypeptide target means binding that is measurably different from a non-specific interaction. Specific binding can be measured, for example, by determining binding of a molecule compared to binding of a control molecule, which generally is a molecule of similar structure that does not have binding activity. For example, specific binding can be determined by competition with a control molecule that is similar to the target, for example, an excess of non-labeled target. In this case, specific binding is indicated if the binding of the labeled target to a probe is competitively inhibited by excess unlabeled target. The term “specific binding” or “specifically binds to” or is “specific for” a particular polypeptide or an epitope on a particular polypeptide target as used herein can be exhibited, for example, by a molecule having a Kd for the target of at least about 10⁻⁴ M, alternatively at least about 10⁻⁵ M, alternatively at least about 10⁻⁶ M, alternatively at least about 10⁻⁷ M, alternatively at least about 10⁻⁸ M, alternatively at least about 10⁻⁹ M, alternatively at least about 10⁻¹⁰ M, alternatively at least about 10⁻¹¹ M, alternatively at least about 10⁻¹² M, or greater. In one embodiment, the term “specific binding” refers to binding where a molecule binds to a particular polypeptide or epitope on a particular polypeptide without substantially binding to any other polypeptide or polypeptide epitope. In certain embodiments, an antibody that binds to GFRAL has a dissociation constant (Kd) of less than or equal to 10 nM, 5 nM, 4 nM, 3 nM, 2 nM, 1 nM, 0.9 nM, 0.8 nM, 0.7 nM, 0.6 nM, 0.5 nM, 0.4 nM, 0.3 nM, 0.2 nM, or 0.1 nM. The lower the K_{D}, the higher the affinity of the anti-GFRAL antibody. In certain embodiments, anti-GFRAL antibody binds to an epitope of GFRAL that is conserved among GFRAL from different species (e.g., between human and cyno GFRAL).

[0147] The term “compete” when used in the context of anti-GFRAL antibodies (e.g., antagonistic antibodies and binding proteins that bind to GFRAL) that bind to or compete for the same epitope or binding site on a target means competition between as determined by an assay in which the antibody (or binding fragment) thereof under study prevents or inhibits the specific binding of a reference molecule (e.g., a reference ligand, or reference antigen binding protein, such as a reference antibody) to a common antigen (e.g., GFRAL or a fragment thereof). Numerous types of competitive binding assays can be used to determine if a test antibody competes with a reference antibody for binding to GFRAL (e.g., human GFRAL). Examples of assays that can be employed include solid phase direct or indirect radioimmunoassay (RIA), solid phase direct or indirect enzyme immunoassay (EIA), sandwich competition assay (see, e.g., Stahli et al., (1983) Methods in Enzymology 9:242-253); solid phase direct biotin-avidin EIA (see, e.g., Kirkland et al., (1986) J. Immunol. 137:3614-3619) solid phase direct labeled assay, solid phase direct labeled sandwich assay (see, e.g., Harlow and Lane, (1988) Antibodies, A Laboratory Manual, Cold Spring Harbor Press); solid phase direct label RIA using 1-125 label (see, e.g., Morel et al., (1988) Molec. Immunol. 25:7-15); solid phase direct biotin-avidin EIA (see, e.g., Cheung, et al., (1990) Virology 176:546-552); and direct labeled RIA (Moldenhauer et al., (1990) Scand. J. Immunol. 32:77-82). Typically, such an assay involves the use of a purified antigen (e.g., GFRAL such as human GFRAL) bound to a solid surface or cells bearing either of an unlabelled test antigen binding protein (e.g., test anti-GFRAL antibody) or a labeled reference antigen binding protein (e.g., reference anti-GFRAL antibody). Competitive inhibition may be measured by determining the amount of label bound to the solid surface or cells in the presence of the test antigen binding protein. Usually the test antigen binding protein is present in excess. Antibodies identified by competition assay (competing antibodies) include antibodies binding to the same epitope as the reference antibody and/or antibodies binding to an adjacent epitope sufficiently proximal to the epitope bound by the reference for antibodies steric hindrance to occur. Additional details regarding methods for determining competitive binding and/or binding to the same epitope are described herein. Usually, when a competing antibodies protein is present in excess, it will inhibit specific binding of a reference antibodies to a common antigen by at least 23%, for example 40%, 45%, 50%, 55%, 60%, 65%, 70% or 75%. In some instance, binding is inhibited by at least 80%, 85%, 90%, 95%, 96% or 97%, 98%, 99% or more.

[0148] The term “anti-GFRAL antibody” or “an antibody that binds to GFRAL” includes an antibody that is capable of binding GFRAL with sufficient affinity such that the antibody is useful as a diagnostic and/or therapeutic agent in targeting GFRAL. In certain embodiments, the extent of binding of an anti-GFRAL antibody to an unrelated, non-GFRAL protein is less than about 10% of the binding of the antibody to GFRAL as measured, for example, by fluorescence activated cell sorting (FACS) analysis or an immunoassay such as a radioimmunoassay (RIA). An antibody that “specifically binds to” or is “specific for” GFRAL is illustrated herein. In certain embodiments, an antibody that binds to GFRAL, as described herein, has a dissociation constant (Kd) of less than or equal to 10 nM, 9 nM, 8 nM, 7 nM, 6 nM, 5 nM, 4 nM, 0.9 nM, 0.8 nM, 0.7 nM, 0.6 nM, 0.5 nM, 0.4 nM, 0.3 nM, 0.2 nM, or 0.1 nM, and/or is greater than or equal to 0.1 nM. In certain embodiments, anti-GFRAL antibody binds to an epitope of GFRAL that is conserved among GFRAL from different species (e.g., between human and cyno GFRAL).

[0149] The terms “crystal”, and “crystallized” as used herein, refer to one or more proteins or fragments thereof that exist in the form of a crystal. Crystals are one form of the solid state of matter, which is distinct from other forms such as the amorphous solid state or the liquid crystalline state. Crystals are composed of regular, repeating, three-dimensional arrays of atoms, ions, molecules (e.g., proteins such as antibodies), or molecular assemblies (e.g., ligand/receptor or antigen/antibody complexes). These three-dimensional arrays are arranged according to specific mathematical relationships that are well-understood in the field. The fundamental unit, or building block, that is repeated in a crystal is called the asymmetric unit. Repetition of the asymmetric unit in an arrangement that conforms to a given, well-defined crystallographic symmetry provides the “unit cell” of the crystal. Repetition of the unit cell by regular translations in all three dimensions provides the crystal. See Giege, R. and Ducruix, A. Barrett, Crystallization of Nucleic Acids and Proteins, a Practical Approach, 2nd ea., pp. 20 1-16, Oxford University Press, New York, N.Y., (1999).

[0150] An “isolated” antibody is substantially free of cellular material or other contaminating proteins from the cell or tissue source and/or other contaminant components from which the antibody is derived, or substantially free of chemical precursors or other chemicals when chemically synthesized. The language “substantially free of cellular material” includes preparations of an antibody in which the antibody is separated from cellular components of the cells from which it is isolated or recombinantly produced. Thus, an antibody that is substantially free of cellular material includes preparations of antibody having less than about 30%, 25%, 20%, 15%, 10%, 5%, or 1% (by dry weight) of heterologous protein (also referred to herein as a “contaminating protein”). In certain embodiments, when the antibody is recombinantly produced, it is substantially free of culture medium, e.g., culture medium represents less than about 20%, 15%, 10%, 5%, or 1% of the volume of the protein preparation. In certain embodiments, when the antibody is produced by chemical synthesis, it is substantially free of chemical precursors or other chemicals, for example, it is separated from chemical precursors or other chemicals which are involved in the synthesis of the protein. Accordingly such preparations of the antibody have less than about 30%, 25%, 20%, 15%, 10%, 5%, or 1% (by dry weight) of chemical precursors or compounds other than the antibody of interest. Contaminant components can also include, but are not limited to, materials that would interfere with therapeutic uses for the antibody, and may include enzymes, hormones, and other proteinaceous or nonproteinaceous solutes. In certain embodiments, the antibody will be purified (1) to greater than 95% by weight of antibody as determined by the Lowry method (Lowry et al. J. Bio. Chem. 193:265-275, 1951), such as 96%, 97%, 98%, or 99%, by weight, (2) to a degree sufficient to obtain at least 15 residues of N-terminal or internal amino acid sequence by use of a spinning cup sequenator, or (3) to homogeneity by SDS-PAGE under reducing or nonreducing conditions using Coomassie blue or, preferably, silver stain. Isolated antibody includes the antibody in situ within recombinant cells since at least one component of the antibody's natural environment will not be present. Ordinarily, however, isolated antibody will be prepared by at least one purification step. In specific embodiments, antibodies provided herein are isolated.

[0151] A 4-chain antibody unit is a heterotetrameric glycoprotein composed of two identical light (L) chains and two identical heavy (H) chains. In the case of IgGs, the 4-chain unit is generally about 150,000 daltons. Each L chain is linked to a H chain by one covalent disulfide bond, while the two H chains are linked to each other by one or more disulfide bonds depending on the H chain isotype. Each H and L chain also has regularly spaced intrachain disulfide bridges. Each H chain has at the N-terminus, a variable domain (VH) followed by three constant domains (CH) for each of the α and γ chains and four CH domains for μ and ε isotypes. Each L chain has at the N-terminus, a variable domain (VL) followed by a constant domain (CL) at its other end. The VL is aligned with the VH and the CL is aligned with the first constant domain of the heavy chain (CH1). Particular amino acid residues are believed to form an interface between the light chain and heavy chain variable domains. The pairing of a VH and VL together forms a single antigen-binding site. For the structure and properties of the different classes of antibodies, see, e.g., Basic and Clinical Immunology, 8th edition, Daniel P. Stites, Abba I. Terr and Tristram G. Parslow (eds.), Appleton & Lange, Norwalk, CT, 1994, page 71 and Chapter 6.

[0152] The term “variable region” or “variable domain” refers to a portion of the light or heavy chains of an antibody that is generally located at the amino-terminal of the light or heavy chain and has a length of about 120 to 130 amino acids in the heavy chain and about 100 to 110 amino acids in the light chain, and are used in the binding and specificity of each particular antibody for its particular antigen. The variable region of the heavy chain may be referred to as “VH.” The variable region of the light chain may be referred to as “VL.” The term “variable” refers to the fact that certain segments of the variable regions differ extensively in sequence among antibodies. The V region mediates antigen binding and defines specificity of a particular antibody for its particular antigen. However, the variability is not evenly distributed across the 110-amino acid span of the variable regions. Instead, the V regions consist of less variable (e.g., relatively invariant) stretches called framework regions (FRs) of about 15-30 amino acids separated by shorter regions of greater variability (e.g., extreme variability) called “hypervariable regions” that are each about 9-12 amino acids long. The variable regions of heavy and light chains each comprise four FRs, largely adopting a β sheet configuration, connected by three hypervariable regions, which form loops connecting, and in some cases forming part of, the β sheet structure. The hypervariable regions in each chain are held together in close proximity by the FRs and, with the hypervariable regions from the other chain, contribute to the formation of the antigen-binding site of antibodies (see, e.g., Kabat et al., Sequences of Proteins of Immunological Interest, 5th Ed. Public Health Service, National Institutes of Health, Bethesda, MD, 1991)). The constant regions are not involved directly in binding an antibody to an antigen, but exhibit various effector functions, such as participation of the antibody in antibody dependent cellular cytotoxicity (ADCC) and complement dependent cytotoxicity (CDC). The variable regions differ extensively in sequence between different antibodies. The variability in sequence is concentrated in the CDRs while the less variable portions in the variable region are referred to as framework regions (FR). The CDRs of the light and heavy chains are primarily responsible for the interaction of the antibody with antigen. In specific embodiments, the variable region is a human variable region.

[0153] The term “variable region residue numbering as in Kabat” or “amino acid position numbering as in Kabat”, and variations thereof, refers to the numbering system used for heavy chain variable regions or light chain variable regions of the compilation of antibodies in Kabat et al., Sequences of Proteins of Immunological Interest, 5th Ed. Public Health Service, National Institutes of Health, Bethesda, MD. (1991). Using this numbering system, the actual linear amino acid sequence may contain fewer or additional amino acids corresponding to a shortening of, or insertion into, a FR or CDR of the variable domain. For example, a heavy chain variable domain may include a single amino acid insert (residue 52a according to Kabat) after residue 52 of H2 and inserted residues (e.g., residues 82a, 82b, and 82c, etc, according to Kabat) after heavy chain FR residue 82. The Kabat numbering of residues may be determined for a given antibody by alignment at regions of homology of the sequence of the antibody with a “standard” Kabat numbered sequence. The Kabat numbering system is generally used when referring to a residue in the variable domain (approximately residues 1-107 of the light chain and residues 1-113 of the heavy chain) (e.g., Kabat et al., Sequences of Immunological Interest. 5th Ed. Public Health Service, National Institutes of Health, Bethesda, Md. (1991)). The “EU numbering system” or “EU index” is generally used when referring to a residue in an immunoglobulin heavy chain constant region (e.g., the EU index reported in Kabat et al., supra). The “EU index as in Kabat” refers to the residue numbering of the human IgG 1 EU antibody. Other numbering systems have been described, including, for example, by AbM, Chothia, Contact, IMGT and AHon. Various numbering systems are illustrated in Tables 1-24.

[0154] An “intact” antibody is one comprising an antigen-binding site as well as a light chain constant region CL and at least heavy chain constant regions, CH1, CH2 and CH3. The constant regions may include human constant regions or amino acid sequence variants thereof. Preferably, an intact antibody has one or more effector functions.

[0155] “Antibody fragments” comprise a portion of an intact antibody, preferably the antigen binding or variable region of the intact antibody. Examples of antibody fragments include, without limitation, Fab, Fab′, F(ab′)2, and Fv fragments; diabodies and di-diabodies (see, e.g., Holliger, P. et al., (1993) Proc. Natl. Acad. Sci. 90:6444-8; Lu, D. et al., (2005) J. Biol. Chem. 280:19665-72; Hudson et al., Nat. Med. 9:129-134 (2003); WO 93/11161; and U.S. Pat. Nos. 5,837,242 and 6,492,123); single-chain antibody molecules (see, e.g., U.S. Pat. Nos. 4,946,778; 5,260,203; 5,482,858 and 5,476,786); dual variable domain antibodies (see, e.g., U.S. Pat. No. 7,612,181); single variable domain antibodies (SdAbs) (see, e.g., Woolven et al., Immunogenetics 50:98-101, 1999; Streltsov et al., Proc Natl Acad Sci USA. 101:12444-12449, 2004); and multispecific antibodies formed from antibody fragments.

[0156] A “functional fragment” or “binding fragment” or “antigen binding fragment” of a therapeutic antibody will exhibit at least one if not some or all of the biological functions attributed to the intact antibody, the function comprising at least binding to the target antigen, (e.g., a GFRAL binding fragment or fragment that binds to GFRAL).

[0157] The term “fusion protein” as used herein refers to a polypeptide that comprises an amino acid sequence of an antibody and an amino acid sequence of a heterologous polypeptide or protein (e.g., a polypeptide or protein not normally a part of the antibody (e.g., a non-anti-GFRAL antigen binding antibody)). The term “fusion” when used in relation to GFRAL or to an anti-GFRAL antibody refers to the joining of a peptide or polypeptide, or fragment, variant and/or derivative thereof, with a heterologous peptide or polypeptide. In certain embodiments, the fusion protein retains the biological activity of the GFRAL or anti-GFRAL antibody. In certain embodiments, the fusion protein comprises a GFRAL antibody VH region, VL region, VH CDR (one, two or three VH CDRs), and/or VL CDR (one, two or three VL CDRs), wherein the fusion protein binds to a GFRAL epitope, a GFRAL fragment and/or a GFRAL polypeptide.

[0158] The term “heavy chain” when used in reference to an antibody refers to a polypeptide chain of about 50-70 kDa, wherein the amino-terminal portion includes a variable region of about 120 to 130 or more amino acids and a carboxy-terminal portion that includes a constant region (e.g., CH1, CH2, CH3, CH4). The constant region can be one of five distinct types, (e.g., isotypes) referred to as alpha (α), delta (δ), epsilon (ε), gamma (γ) and mu (μ), based on the amino acid sequence of the heavy chain constant regions. The distinct heavy chains differ in size: α, δ and γ contain approximately 450 amino acids, while u and & contain approximately 550 amino acids. When combined with a light chain, these distinct types of heavy chains give rise to five well known classes (e.g., isotypes) of antibodies, IgA, IgD, IgE, IgG and IgM, respectively, including four subclasses of IgG, namely IgG1, IgG2, IgG3 and IgG4. A heavy chain can be a human heavy chain.

[0159] The term “light chain” when used in reference to an antibody refers to a polypeptide chain of about 25 kDa, wherein the amino-terminal portion includes a variable region of about 100 to about 110 or more amino acids and a carboxy-terminal portion that includes a constant region. The approximate length of a light chain is 211 to 217 amino acids. There are two distinct types, referred to as kappa (κ) of lambda (λ) based on the amino acid sequence of the constant domains. Light chain amino acid sequences are well known in the art. A light chain can be a human light chain.

[0160] The term “effective amount” as used herein refers to the amount of a therapy (e.g., an anti-GFRAL antibody or pharmaceutical composition provided herein; see, e.g., antibodies comprising CDR, VH, and/or VL sequences as shown in Tables 1-24) which is sufficient to reduce the severity and/or frequency of symptoms, eliminate the symptoms and/or underlying cause, prevent the occurrence of symptoms and/or their underlying cause, and/or improve or remediate the damage that results from or is associated with a GDF15-mediated disease, disorder, or condition, including, for example, involuntary body weight loss, a glucose metabolism disorder or a body weight disorder. This term also encompasses an amount necessary for the reduction or amelioration of the advancement or progression of a given GDF15-mediated disease, disorder or condition, reduction or amelioration of the recurrence, development or onset of a GDF15-mediated disease, disorder or condition, and/or to improve or enhance the prophylactic or therapeutic effect(s) of another therapy (e.g., a therapy other than anti-GFRAL antibody provided herein). In some embodiments, the effective amount is administered in one or more doses, including intermittent doses, wherein one ore more doses are given in a treatment period followed by a resting period when an antibody is not administered (e.g., one cycle of treatment period and rest period can be followed with additional cycles, with one or more treatment periods followed by one or more resting periods). In some embodiments, the effective amount of an antibody provided herein is from about 0.1 mg/kg (mg of antibody per kg weight of the subject) to about 100 mg/kg. In certain embodiments, an effective amount of an antibody provided therein is about 0.1 mg/kg, about 0.5 mg/kg, about 1 mg/kg, 3 mg/kg, 5 mg/kg, about 10 mg/kg, about 15 mg/kg, about 20 mg/kg, about 25 mg/kg, about 30 mg/kg, about 35 mg/kg, about 40 mg/kg, about 45 mg/kg, about 50 mg/kg, about 60 mg/kg, about 70 mg/kg, about 80 mg/kg, about 90 mg/kg, or about 100 mg/kg (or a range therein). In some embodiments, effective amount as used herein also refers to the amount of an antibody provided herein to achieve a specified result (e.g., mimic or modulate an in vitro or an in vivo biological effect induced by the binding of: (i) GFRAL; (ii) GDF15 and GFRAL; or (iii) GDF15, GFRAL, and RET). For example, an effective amount includes an amount (e.g., in one or more doses) of an anti-GFRAL antibody as described herein effective to: (i) increase body weight; (ii) maintain body weight; (iii) reduce body weight loss; (iv) increase body mass (e.g., lean mass or fat mass); (v) maintain body mass (e.g., lean mass or fat mass); or (vi) reduce loss of body mass (e.g., lean mass or fat mass).

[0161] The term “host cell” as used herein refers to a particular subject cell that may be transfected with a nucleic acid molecule and the progeny or potential progeny of such a cell. Progeny of such a cell may not be identical to the parent cell transfected with the nucleic acid molecule due to mutations or environmental influences that may occur in succeeding generations or integration of the nucleic acid molecule into the host cell genome.

[0162] The term “immunomodulatory agent” and variations thereof including, but not limited to, immunomodulatory agents, as used herein refer to an agent that modulates a host's immune system. In certain embodiments, an immunomodulatory agent used in the combination therapies provided herein does not include an anti-GFRAL antibody or antigen-binding fragment. Immunomodulatory agents include, but are not limited to, small molecules, peptides, polypeptides, proteins, fusion proteins, antibodies, inorganic molecules, mimetic agents, and organic molecules. The term “small molecule” and analogous terms include, but are not limited to, peptides, peptidomimetics, amino acids, amino acid analogues, polynucleotides, polynucleotide analogues, nucleotides, nucleotide analogues, organic or inorganic compounds (i.e., including heterorganic and/or ganometallic compounds) having a molecular weight less than about 10,000 grams per mole, organic or inorganic compounds having a molecular weight less than about 5,000 grams per mole, organic or inorganic compounds having a molecular weight less than about 1,000 grams per mole, organic or inorganic compounds having a molecular weight less than about 500 grams per mole, and salts, esters, and other pharmaceutically acceptable forms of such compounds. In some embodiments, an immunomodulatory agent is an immunostimulatory agent. In some embodiments, an immunomodulatory agent is an immunosuppressant agent. In some embodiments, immunomodulatory agents are agents (e.g., antibodies) that modulate (e.g., inhibit or stimulate) proteins known as immune checkpoint molecules (e.g., co-inhibitory or co-stimulatory), for example, C10orf54, CD86, CD80, PDL-1, PDL-2, CTLA-4, PD1, LAG3, BTNL2, B7-H3, B7-H4, a butyrophilin, CD48, CD244, TIM-3, CD200R, CD200, CD160, BTLA, HVEM, LAIR1, TIM1, Galectin 9, TIM3, CD48, 2B4, CD155, CD112, CD113 and TIGIT (e.g., co-inhibitory), and/or CD154, TNFRSF25, GITR, 4-1BB, OX40, CD27, TMIGD2, ICOS, CD28, CD40, TL1A, GITRL, 41BBL, OX40L, CD70, HHLA2, ICOSL, a cytokine, LIGHT, HVEM, CD30, CD30L, B7-H2, CD80, CD86, CD40L, TIM4, TIM1, SLAM, CD48, CD58, CD155, CD112, DR3, GITR, CD2, and CD226 (e.g., co-stimulatory).

[0163] The term “monoclonal antibody” as used herein refers to an antibody obtained from a population of substantially homogeneous antibodies, e.g., the individual antibodies comprising the population are identical except for possible naturally occurring mutations that may be present in minor amounts, and each monoclonal antibody will typically recognize a single epitope on the antigen. In specific embodiments, a “monoclonal antibody,” as used herein, is an antibody produced by a single hybridoma or other cell, wherein the antibody binds to only a GFRAL epitope as determined, for example, by ELISA or other antigen-binding or competitive binding assay known in the art. The term “monoclonal” is not limited to any particular method for making the antibody. For example, the monoclonal antibodies useful in the present disclosure may be prepared by the hybridoma methodology first described by Kohler et al., Nature, 256:495 (1975), or may be made using recombinant DNA methods in bacterial, eukaryotic animal or plant cells (see, e.g., U.S. Pat. No. 4,816,567). The “monoclonal antibodies” may also be isolated from phage antibody libraries using the techniques described in Clackson et al., Nature, 352:624-628 (1991) and Marks et al., J. Mol. Biol., 222:581-597 (1991), for example. Other methods for the preparation of clonal cell lines and of monoclonal antibodies expressed thereby are well known in the art (see, for example, Chapter 11 in: Short Protocols in Molecular Biology, (2002) 5th Ed., Ausubel et al., eds., John Wiley and Sons, New York). Exemplary methods of producing monoclonal antibodies are provided in the Examples herein.

[0164] The term “native” when used in connection with biological materials such as nucleic acid molecules, polypeptides, host cells, and the like, refers to those which are found in nature and not manipulated, modified, and/or changed (e.g., isolated, purified, selected) by a human being.

[0165] The antibodies provided herein can include “chimeric” antibodies in which a portion of the heavy and/or light chain is identical with or homologous to corresponding sequences in antibodies derived from a particular species or belonging to a particular antibody class or subclass, while the remainder of the chain(s) is identical with or homologous to corresponding sequences in antibodies derived from another species or belonging to another antibody class or subclass, as well as fragments of such antibodies, so long as they exhibit the desired biological activity (see, e.g., U.S. Pat. No. 4,816,567; and Morrison et al., Proc. Natl. Acad. Sci. USA, 81:6851-6855 (1984)).

[0166] “Humanized” forms of nonhuman (e.g., murine) antibodies are chimeric antibodies that include human immunoglobulins (e.g., recipient antibody) in which the native CDR residues are replaced by residues from the corresponding CDR of a nonhuman species (e.g., donor antibody) such as mouse, rat, rabbit or nonhuman primate having the desired specificity, affinity, and capacity. In some instances, one or more FR region residues of the human immunoglobulin are replaced by corresponding nonhuman residues. Furthermore, humanized antibodies can comprise residues that are not found in the recipient antibody or in the donor antibody. These modifications are made to further refine antibody performance. A humanized antibody heavy or light chain can comprise substantially all of at least one or more variable regions, in which all or substantially all of the CDRs correspond to those of a nonhuman immunoglobulin and all or substantially all of the FRs are those of a human immunoglobulin sequence. In certain embodiments, the humanized antibody will comprise at least a portion of an immunoglobulin constant region (Fc), typically that of a human immunoglobulin. For further details, see, Jones et al., Nature, 321:522-525 (1986); Riechmann et al., Nature, 332:323-329 (1988); and Presta, Curr. Op. Struct. Biol., 2:593-596 (1992); Carter et al., Proc. Natl. Acd. Sci. USA 89:4285-4289 (1992); and U.S. Pat. No. 6,800,738 (issued Oct. 5, 2004), 6,719,971 (issued Sep. 27, 2005), 6,639,055 (issued Oct. 28, 2003), 6,407,213 (issued Jun. 18, 2002), and 6,054,297 (issued Apr. 25, 2000).

[0167] A “human antibody” is one which possesses an amino acid sequence which corresponds to that of an antibody produced by a human and/or has been made using any of the techniques for making human antibodies as disclosed herein. This definition of a human antibody specifically excludes a humanized antibody comprising non-human antigen-binding residues. Human antibodies can be produced using various techniques known in the art, including phage-display libraries (Hoogenboom and Winter, J. Mol. Biol., 227:381 (1991); Marks et al., J. Mol. Biol., 222:581 (1991) and yeast display libraries (Chao et al., Nature Protocols 1:755-768 (2006)). Also available for the preparation of human monoclonal antibodies are methods described in Cole et al., Monoclonal Antibodies and Cancer Therapy, Alan R. Liss, p. 77 (1985); Boerner et al., J. Immunol., 147 (1): 86-95 (1991). See also van Dijk and van de Winkel, Curr. Opin. Pharmacol., 5:368-74 (2001). Human antibodies can be prepared by administering the antigen to a transgenic animal that has been modified to produce such antibodies in response to antigenic challenge, but whose endogenous loci have been disabled, e.g., mice (see, e.g., Jakobovits, A., Curr. Opin. Biotechnol. 1995, 6 (5): 561-6; Brüggemann and Taussing, Curr. Opin. Biotechnol. 1997, 8 (4): 455-8; and U.S. Pat. Nos. 6,075,181 and 6,150,584 regarding XENOMOUSE™ technology). See also, for example, Li et al., Proc. Natl. Acad. Sci. USA, 103:3557-3562 (2006) regarding human antibodies generated via a human B-cell hybridoma technology.

[0168] A “CDR” refers to one of three hypervariable regions (H1, H2 or H3) within the non-framework region of the immunoglobulin (Ig or antibody) VH β-sheet framework, or one of three hypervariable regions (L1, L2 or L3) within the non-framework region of the antibody VL β-sheet framework. Accordingly, CDRs are variable region sequences interspersed within the framework region sequences. CDR regions are well known to those skilled in the art and have been defined by, for example, Kabat as the regions of most hypervariability within the antibody variable (V) domains (Kabat et al., J. Biol. Chem. 252:6609-6616 (1977); Kabat, Adv. Prot. Chem. 32:1-75 (1978)). CDR region sequences also have been defined structurally by Chothia as those residues that are not part of the conserved β-sheet framework, and thus are able to adapt different conformations (Chothia and Lesk, J. Mol. Biol. 196:901-917 (1987)). Both terminologies are well recognized in the art. CDR region sequences have also been defined by AbM, Contact and IMGT. CDR region sequences are illustrated in Tables 1-24. The positions of CDRs within a canonical antibody variable region have been determined by comparison of numerous structures (Al-Lazikani et al., J. Mol. Biol. 273:927-948 (1997); Morea et al., Methods 20:267-279 (2000)). Because the number of residues within a hypervariable region varies in different antibodies, additional residues relative to the canonical positions are conventionally numbered with a, b, c and so forth next to the residue number in the canonical variable region numbering scheme (Al-Lazikani et al., supra (1997)). Such nomenclature is similarly well known to those skilled in the art.

[0169] The term “hypervariable region”, “HVR”, or “HV”, when used herein refers to the regions of an antibody variable region that are hypervariable in sequence and/or form structurally defined loops. Generally, antibodies comprise six hypervariable regions; three in the VH (H1, H2, H3), and three in the VL (L1, L2, L3). A number of hypervariable region delineations are in use and are encompassed herein. The Kabat Complementarity Determining Regions (CDRs) are based on sequence variability and are the most commonly used (see, e.g., Kabat et al., Sequences of Proteins of Immunological Interest, 5th Ed. Public Health Service, National Institutes of Health, Bethesda, MD. (1991)). Chothia refers instead to the location of the structural loops (see, e.g., Chothia and Lesk, J. Mol. Biol. 196:901-917 (1987)). The end of the Chothia CDR-H1 loop when numbered using the Kabat numbering convention varies between H32 and H34 depending on the length of the loop (this is because the Kabat numbering scheme places the insertions at H35A and H35B; if neither 35A nor 35B is present, the loop ends at 32; if only 35A is present, the loop ends at 33; if both 35A and 35B are present, the loop ends at 34). The AbM hypervariable regions represent a compromise between the Kabat CDRs and Chothia structural loops, and are used by Oxford Molecular's AbM antibody modeling software (see, e.g., Martin, in Antibody Engineering, Vol. 2, Chapter 3, Springer Verlag). The “contact” hypervariable regions are based on an analysis of the available complex crystal structures. The residues from each of these hypervariable regions or CDRs are noted below.

[0170] Recently, a universal numbering system has been developed and widely adopted, ImMunoGeneTics (IMGT) Information System® (Lafranc et al., Dev. Comp. Immunol. 27 (1): 55-77 (2003)). IMGT is an integrated information system specializing in immunoglobulins (IG), T cell receptors (TR) and major histocompatibility complex (MHC) of human and other vertebrates. Herein, the CDRs are referred to in terms of both the amino acid sequence and the location within the light or heavy chain. As the “location” of the CDRs within the structure of the immunoglobulin variable domain is conserved between species and present in structures called loops, by using numbering systems that align variable domain sequences according to structural features, CDR and framework residues and are readily identified. This information can be used in grafting and replacement of CDR residues from immunoglobulins of one species into an acceptor framework from, typically, a human antibody. An additional numbering system (AHon) has been developed by Honegger and Plückthun, J. Mol. Biol. 309:657-670 (2001). Correspondence between the numbering system, including, for example, the Kabat numbering and the IMGT unique numbering system, is well known to one skilled in the art (see, e.g., Kabat, supra; Chothia and Lesk, supra; Martin, supra; Lefranc et al., supra) and is also illustrated in Tables 1-24. An Exemplary system, shown herein, combines Kabat and Chothia.

| | Exemplary | IMGT | Kabat | AbM | Chothia | Contact |
|---|---|---|---|---|---|---|
| V_{H} CDR1 | 26-35 | 27-38 | 31-35 | 26-35 | 26-32 | 30-35 |
| V_{H} CDR2 | 50-65 | 56-65 | 50-65 | 50-58 | 53-55 | 47-58 |
| V_{H} CDR3 | 95-102 | 105-117 | 95-102 | 95-102 | 96-101 | 93-101 |
| V_{L} CDR1 | 24-34 | 27-38 | 24-34 | 24-34 | 26-32 | 30-36 |
| V_{L} CDR2 | 50-56 | 56-65 | 50-56 | 50-56 | 50-52 | 46-55 |
| V_{L} CDR3 | 89-97 | 105-117 | 89-97 | 89-97 | 91-96 | 89-96 |

[0171] Hypervariable regions may comprise “extended hypervariable regions” as follows: 24-36 or 24-34 (L1), 46-56 or 50-56 (L2) and 89-97 or 89-96 (L3) in the VL and 26-35 or 26-35A (H1), 50-65 or 49-65 (H2) and 93-102, 94-102, or 95-102 (H3) in the VH. As used herein, the terms “HVR” and “CDR” are used interchangeably.

[0172] The term “constant region” or “constant domain” refers to a carboxy terminal portion of the light and heavy chain which is not directly involved in binding of the antibody to antigen but exhibits various effector function, such as interaction with the Fc receptor. The terms refer to the portion of an immunoglobulin molecule having a more conserved amino acid sequence relative to the other portion of the immunoglobulin, the variable region, which contains the antigen binding site. The constant region may contain the CH1, CH2 and CH3 regions of the heavy chain and the CL region of the light chain.

[0173] The term “framework” or “FR” residues are those variable region residues flanking the CDRs. FR residues are present, for example, in chimeric, humanized, human, domain antibodies, diabodies, linear antibodies, and bispecific antibodies. FR residues are those variable domain residues other than the hypervariable region residues or CDR residues.

[0174] An “affinity matured” antibody is one with one or more alterations (e.g., amino acid sequence variations, including changes, additions and/or deletions) in one or more HVRs thereof which result in an improvement in the affinity of the antibody for antigen, compared to a parent antibody which does not possess those alteration(s). Preferred affinity matured antibodies will have nanomolar or even picomolar affinities for the target antigen. Affinity matured antibodies are produced by procedures known in the art. For review, see Hudson and Souriau, Nature Medicine 9:129-134 (2003); Hoogenboom, Nature Biotechnol. 23:1105-1116 (2005); Quiroz and Sinclair, Revista Ingeneria Biomedia 4:39-51 (2010).

[0175] A “blocking” antibody or an “antagonist” antibody is one which inhibits or reduces biological activity of the antigen it binds (e.g., GFRAL, as described herein). For example, blocking antibodies or antagonist antibodies may substantially or completely inhibit the biological activity of the antigen (e.g., GFRAL, as described herein).

[0176] An “agonist antibody” is an antibody that triggers a response, e.g., one that mimics at least one of the functional activities of a polypeptide of interest. An agonist antibody includes an antibody that is a ligand mimetic, for example, wherein a ligand binds to a cell surface receptor and the binding induces cell signaling or activities via an intercellular cell signaling pathway and wherein the antibody induces a similar cell signaling or activation.

[0177] An “antagonist” of GFRAL refers to a molecule (e.g., antibody) that is capable of detectably inhibiting or otherwise decreasing one or more of the biological activities of GFRAL, such as in a cell expressing GFRAL. In some embodiments, an antagonist of GFRAL (e.g., an agonistic antibody as described herein) may, for example, act by detectably inhibiting or otherwise decreasing the activation and/or cell signaling pathways of a cell expressing a GFRAL, thereby detectably decreasing a GFRAL-mediated biological activity of the cell relative to the GFRAL-mediated biological activity in the absence of antagonist. In some embodiments the antibodies provided herein are antagonistic anti-GFRAL antibodies, including antibodies that inhibit signaling of a complex comprising GFRAL, GDF15 and/or RET. The inhibition or decrease caused by a GFRAL antagonist need not be complete as long as it is detectable using an assay. For example, a cell-based assay described in the Examples below can be used to analyze a biological activity of GFRAL.

[0178] “Binding affinity” generally refers to the strength of the sum total of noncovalent interactions between a single binding site of a molecule (e.g., a binding protein such as an antibody) and its binding partner (e.g., an antigen). Unless indicated otherwise, as used herein, “binding affinity” refers to intrinsic binding affinity which reflects a 1:1 interaction between members of a binding pair (e.g., antibody and antigen). The affinity of a binding molecule X for its binding partner Y can generally be represented by the dissociation constant (K_{D}). Affinity can be measured by common methods known in the art, including those described herein. Low-affinity antibodies generally bind antigen slowly and tend to dissociate readily, whereas high-affinity antibodies generally bind antigen faster and tend to remain bound longer. A variety of methods of measuring binding affinity are known in the art, any of which can be used for purposes of the present disclosure. Specific illustrative embodiments include the following. In one embodiment, the “K_{D}” or “K_{D} value” may be measured by assays known in the art, for example by a binding assay. The K_{D} may be measured in a radiolabeled antigen binding assay (RIA), for example, performed with the Fab version of an antibody of interest and its antigen (Chen, et al., (1999) J. Mol Biol 293:865-881). The K_{D} or K_{D} value may also be measured by using surface plasmon resonance assays by Biacore, using, for example, a BIAcore™-2000 or a BIAcore™-3000 BIAcore, Inc., Piscataway, NJ), or by biolayer interferometry using, for example, the OctetQK384 sytem (ForteBio, Menlo Park, CA). An “on-rate” or “rate of association” or “association rate” or “kon” may can also be determined with the same surface plasmon resonance or biolayer interferometry techniques described above using, for example, a BIAcore™-2000 or a BIAcore™-3000 (BIAcore, Inc., Piscataway, NJ), or the OctetQK384 sytem (ForteBio, Menlo Park, CA).

[0179] The phrase “substantially similar” or “substantially the same” denotes a sufficiently high degree of similarity between two numeric values (e.g., one associated with an antibody of the present disclosure and the other associated with a reference antibody) such that one of skill in the art would consider the difference between the two values to be of little or no biological and/or statistical significance within the context of the biological characteristic measured by the values (e.g., K_{D} values). For example, the difference between the two values may be less than about 50%, less than about 40%, less than about 30%, less than about 20%, less than about 10%, less than about 5%, as a function of the value for the reference antibody.

[0180] The phrase “substantially reduced,” or “substantially different”, as used herein, denotes a sufficiently high degree of difference between two numeric values (e.g., one associated with an antibody of the present disclosure and the other associated with a reference antibody) such that one of skill in the art would consider the difference between the two values to be of statistical significance within the context of the biological characteristic measured by the values. For example, the difference between said two values may be preferably greater than about 10%, greater than about 20%, greater than about 30%, greater than about 40%, greater than about 50% as a function of the value for the reference antibody.

[0181] Antibody “effector functions” refer to those biological activities attributable to the Fc region (e.g., a native sequence Fc region or amino acid sequence variant Fc region) of an antibody, and vary with the antibody isotype. Examples of antibody effector functions include: C1q binding and complement dependent cytotoxicity; Fc receptor binding; antibody-dependent cell-mediated cytotoxicity (ADCC); phagocytosis; down regulation of cell surface receptors (e.g., B cell receptor); and B cell activation.

[0182] The term “Fc region” herein is used to define a C-terminal region of an immunoglobulin heavy chain, including, for example, native sequence Fc regions, recombinant Fc regions, and variant Fc regions. Although the boundaries of the Fc region of an immunoglobulin heavy chain might vary, the human IgG heavy chain Fc region is often defined to stretch from an amino acid residue at position Cys226, or from Pro230, to the carboxyl-terminus thereof. The C-terminal lysine (residue 447 according to the EU numbering system) of the Fc region may be removed, for example, during production or purification of the antibody, or by recombinantly engineering the nucleic acid encoding a heavy chain of the antibody. Accordingly, a composition of intact antibodies may comprise antibody populations with all K447 residues removed, antibody populations with no K447 residues removed, and antibody populations having a mixture of antibodies with and without the K447 residue.

[0183] A “functional Fc region” possesses an “effector function” of a native sequence Fc region. Exemplary “effector functions” include C1q binding; complement dependent cytotoxicity (CDC); Fc receptor binding; antibody-dependent cell-mediated cytotoxicity (ADCC); phagocytosis; down regulation of cell surface receptors (e.g., B cell receptor; BCR), etc. Such effector functions generally require the Fc region to be combined with a binding region or binding domain (e.g., an antibody variable region or domain) and can be assessed, including using various assays as disclosed herein and/or as known in the art.

[0184] A “native sequence Fc region” comprises an amino acid sequence identical to the amino acid sequence of an Fc region found in nature, and not manipulated, modified, and/or changed (e.g., isolated, purified, selected, including or combining with other sequences such as variable region sequences) by a human. Native sequence human Fc regions include a native sequence human IgG1 Fc region (non-A and A allotypes); native sequence human IgG2 Fc region; native sequence human IgG3 Fc region; and native sequence human IgG4 Fc region as well as naturally occurring variants thereof.

[0185] A “variant Fc region” comprises an amino acid sequence which differs from that of a native sequence Fc region by virtue of at least one amino acid modification, (e.g., substituting, addition, or deletion) preferably one or more amino acid substitution(s). Preferably, the variant Fc region has at least one amino acid substitution compared to a native sequence Fc region or to the Fc region of a parent polypeptide, for example, from about one to about ten amino acid substitutions, and preferably from about one to about five amino acid substitutions in a native sequence Fc region or in the Fc region of the parent polypeptide. The variant Fc region herein will preferably possess at least about 80% homology with a native sequence Fc region and/or with an Fc region of a parent polypeptide, and more preferably at least about 90% homology therewith, for example, at least about 95% homology therewith. For example, a variant with two amino acid changes to alanine at two positions in the human IgG1 Fc sequence are shown bolded in the amino acid sequence provided below:

(SEQ ID NO: 2001)
ASTKGPSVFPLAPSSKSTSGGTAALGCLVKDYFPEPVTVSWNSGALTSG
VHTFPAVLQSSGLYSLSSVVTVPSSSLGTQTYICNVNHKPSNTKVDKKV
EPKSCDKTHTCPPCPAPALAGGPSVFLFPPKPKDTLMISRTPEVTCVVV
DVSHEDPEVKFNWYVDGVEVHNAKTKPREEQYNSTYRVVSVLTVLHQDW
LNGKEYKCKVSNKALPAPIEKTISKAKGQPREPQVYTLPPSREEMTKNQ
VSLTCLVKGFYPSDIAVEWESNGQPENNYKTTPPVLDSDGSFFLYSKLT
VDKSRWQQGNVFSCSVMHEALHNHYTQKSLSLSPGK

[0186] For example, a variant with two amino acid changes to alanine at two positions in a truncated human IgG1 Fc sequence, in which the C-terminal lysine residue is absent (IgG1 K Fc), are shown bolded in the amino acid sequence provided below:

(SEQ ID NO: 2002)
ASTKGPSVFPLAPSSKSTSGGTAALGCLVKDYFPEPVTVSWNSGALTSG
VHTFPAVLQSSGLYSLSSVVTVPSSSLGTQTYICNVNHKPSNTKVDKKV
EPKSCDKTHTCPPCPAPALAGGPSVFLFPPKPKDTLMISRTPEVTCVVV
DVSHEDPEVKFNWYVDGVEVHNAKTKPREEQYNSTYRVVSVLTVLHQDW
LNGKEYKCKVSNKALPAPIEKTISKAKGQPREPQVYTLPPSREEMTKNQ
VSLTCLVKGFYPSDIAVEWESNGQPENNYKTTPPVLDSDGSFFLYSKLT
VDKSRWQQGNVFSCSVMHEALHNHYTQKSLSLSPG

[0187] For example, a truncated variant of the human IgG1 Fc sequence, in which the C-terminal lysine residue is absent (IgG1 K Fc) is shown in the amino acid sequence provided below:

(SEQ ID NO: 2003)
ASTKGPSVFPLAPSSKSTSGGTAALGCLVKDYFPEPVTVSWNSGALTSG
VHTFPAVLQSSGLYSLSSVVTVPSSSLGTQTYICNVNHKPSNTKVDKKV
EPKSCDKTHTCPPCPAPELLGGPSVFLFPPKPKDTLMISRTPEVTCVVV
DVSHEDPEVKFNWYVDGVEVHNAKTKPREEQYNSTYRVVSVLTVLHQDW
LNGKEYKCKVSNKALPAPIEKTISKAKGQPREPQVYTLPPSREEMTKNQ
VSLTCLVKGFYPSDIAVEWESNGQPENNYKTTPPVLDSDGSFFLYSKLT
VDKSRWQQGNVFSCSVMHEALHNHYTQKSLSLSPG

[0188] For example, a variant with an amino acid change to proline at a position in the human IgG4 Fc sequence is shown bolded in the amino acid sequence provided below:

(SEQ ID NO: 2004)
ASTKGPSVFPLAPCSRSTSESTAALGCLVKDYFPEPVTVSWNSGALTSG
VHTFPAVLQSSGLYSLSSVVTVPSSSLGTKTYTCNVDHKPSNTKVDKRV
ESKYGPPCPPCPAPEFLGGPSVFLFPPKPKDTLMISRTPEVTCVVVDVS
QEDPEVQFNWYVDGVEVHNAKTKPREEQFNSTYRVVSVLTVLHQDWLNG
KEYKCKVSNKGLPSSIEKTISKAKGQPREPQVYTLPPSQEEMTKNQVSL
TCLVKGFYPSDIAVEWESNGQPENNYKTTPPVLDSDGSFFLYSRLTVDK
SRWQEGNVFSCSVMHEALHNHYTQKSLSLSLGK

[0189] For example, a variant with an amino acid change to proline at a position in a human IgG4 Fc sequence, in which the C-terminal lysine is absent (IgG4 K Fc), is shown bolded in the amino acid sequence provided below:

(SEQ ID NO: 2005)
ASTKGPSVFPLAPCSRSTSESTAALGCLVKDYFPEPVTVSWNSGALTSG
VHTFPAVLQSSGLYSLSSVVTVPSSSLGTKTYTCNVDHKPSNTKVDKRV
ESKYGPPCPPCPAPEFLGGPSVFLFPPKPKDTLMISRTPEVTCVVVDVS
QEDPEVQFNWYVDGVEVHNAKTKPREEQFNSTYRVVSVLTVLHQDWLNG
KEYKCKVSNKGLPSSIEKTISKAKGQPREPQVYTLPPSQEEMTKNQVSL
TCLVKGFYPSDIAVEWESNGQPENNYKTTPPVLDSDGSFFLYSRLTVDK
SRWQEGNVFSCSVMHEALHNHYTQKSLSLSLG

[0190] For example, a variant with an amino acid change to Glutamine at a position in the human IgG1 Fc sequence is shown bolded in the amino acid sequence provided below:

(SEQ ID NO: 2006)
ASTKGPSVFPLAPSSKSTSGGTAALGCLVKDYFPEPVTVSWNSGALTSG
VHTFPAVLQSSGLYSLSSVVTVPSSSLGTQTYICNVNHKPSNTKVDKKV
EPKSCDKTHTCPPCPAPELLGGPSVFLFPPKPKDTLMISRTPEVTCVVV
DVSHEDPEVKFNWYVDGVEVHNAKTKPREEQYQSTYRVVSVLTVLHQDW
LNGKEYKCKVSNKALPAPIEKTISKAKGQPREPQVYTLPPSREEMTKNQ
VSLTCLVKGFYPSDIAVEWESNGQPENNYKTTPPVLDSDGSFFLYSKLT
VDKSRWQQGNVFSCSVMHEALHNHYTQKSLSLSPGK

[0191] Any of the VH domains of Tables 1-24 and of FIGS. 4A, 5A, 5C, 5E, 6A, 7A, 8A, 9A, and 10A may be combined with a variant Fc region described herein. Exemplary heavy chain constructs comprising a variant Fc region may include the following constructs designated as shown below; the variable region sequence is bolded with CDR sequences underlined:

3P10 Fab Hc:
(SEQ ID NO: 1824)
QIQLVQSGPELKKPGETVKISCKASGYTFTDYGVIWVKQAPGKALKWMGWINTYTGE
PTYADDLKGRFAFSLETSASSASLQINNLKNEDTATYFCARRYGPEDIDYWGQGTTL
TVSSASTKGPSVFPLAPSSKSTSGGTAALGCLVKDYFPEPVTVSWNSGALTSGVHTFP
AVLQSSGLYSLSSVVTVPSSSLGTQTYICNVNHKPSNTKVDKKVEPKSCDEVD
25M22 Fab Hc:
(SEQ ID NO: 1826)
QVQLQQSGPDLVKPGASVKISCKASGYTFTSYWVNWMKQRPGKGLEWIGRIYPGD
GDTNYNGKFKGKATLTADKSSSTAYMQLSSLTSEDSAVYFCARAYLLRLRRTGYYA
MDYWGQGTSVTVSSASTKGPSVFPLAPSSKSTSGGTAALGCLVKDYFPEPVTVSWNS
GALTSGVHTFPAVLQSSGLYSLSSVVTVPSSSLGTQTYICNVNHKPSNTKVDKKVEPK
SCDEVD
8D8 Fab Hc:
(SEQ ID NO: 1828)
QVQLKESGPGLVAPSQSLSITCTVSGFSLSRYSVHWVRQPPGKGLEWLGMIWGFGS
TDYNSALKSRLSITKDNSKSQFFLKMNSLQTDDTAMYYCARIHTTAGSYWGQGTLVT
VSAASTKGPSVFPLAPSSKSTSGGTAALGCLVKDYFPEPVTVSWNSGALTSGVHTFPA
VLQSSGLYSLSSVVTVPSSSLGTQTYICNVNHKPSNTKVDKKVEPKSCDEVDG
5F12 Fab Hc:
(SEQ ID NO: 1830)
QVQLKQSGTELVRPGASVKLSCKASGYTFTDYYINWVKQRPGQGLEWIARIYPGNG
NTYHNEKFKGKATLTAEKSSSTAYMQLSSLTSEDSAVYFCAREGLYYDYDRYFDYW
GQGTALTVSSASTKGPSVFPLAPSSKSTSGGTAALGCLVKDYFPEPVTVSWNSGALT
SGVHTFPAVLQSSGLYSLSSVVTVPSSSLGTQTYICNVNHKPSNTKVDKKVEPKSCDE
VDG

[0192] A “light chain constant region” includes kappa and lambda constant regions. Any of the VL domains of Tables Tables 1-24 and of FIGS. 4B, 5B, 5D, 5F, 6B, 7B, 8B, 9B, and 10B may be combined with a kappa or lambda constant region described herein.

[0193] An exemplary kappa constant region is provided below:

(SEQ ID NO: 2007)
RTVAAPSVFIFPPSDEQLKSGTASVVCLLNNFYPREAKVQWKVDNALQS
GNSQESVTEQDSKDSTYSLSSTLTLSKADYEKHKVYACEVTHQGLSSPV
TKSFNRGEC

[0194] An exemplary lambda constant region is provided below:

(SEQ ID NO: 2008)
GQPKAAPSVTLFPPSSEELQANKATLVCLISDFYPGAVTVAWKADSSPV
KAGVETTTPSKQSNNKYAASSYLSLTPEQWKSHRSYSCQVTHEGSTVEK
TVAPTECS

[0195] Exemplary light chain constructs comprising a constant region may include the following constructs designated as shown below; the variable region sequence is bolded with CDR sequences underlined:

3P10 Fab Lc:
(SEQ ID NO: 1825)
DIVLTQSPVSLAVSLGQRATISCRASESVDNYGISFMSWFQQKPGQPPKLLIYAASHQ
GSGVPARFSGSGSGTDFSLNIHPMEEDDSAMYFCLQSKEVPWTFGGGTKLEIKRTVA
APSVFIFPPSDEQLKSGTASVVCLLNNFYPREAKVQWKVDNALQSGNSQESVTEQDS
KDSTYSLSSTLTLSKADYEKHKVYACEVTHQGLSSPVTKSFNRGEC
25M22 Fab Lc:
(SEQ ID NO: 1827)
DVVLTQTPLSLPVNIGDQASISCKSTKSLLNSDEFTYLDWYLQKPGQSPQLLIFLVSN
RFSGVPDRFSGSGSGTDFTLKISRVEAEDLGVYYCFQSNYLPYTFGGGTKLEIKRTVA
APSVFIFPPSDEQLKSGTASVVCLLNNFYPREAKVQWKVDNALQSGNSQESVTEQDS
KDSTYSLSSTLTLSKADYEKHKVYACEVTHQGLSSPVTKSFNRGEC
8D8 Fab Lc:
(SEQ ID NO: 1829)
DIVMTQSQKFMSTSIGDRVSVTCKASQNVGTNVAWYQQKPGQSPKALVYSTSYRYS
GVPDRFTGSGSGTDFTLTISNVQSEDLAEYFCHQYNSYPLTFGAGTKLELKRTVAAP
SVFIFPPSDEQLKSGTASVVCLLNNFYPREAKVQWKVDNALQSGNSQESVTEQDSKD
STYSLSSTLTLSKADYEKHKVYACEVTHQGLSSPVTKSFNRGEC
5F12 Fab Lc:
(SEQ ID NO: 1831)
NIVLTQSPASLAVSLGQRATISCRASESVDTYGNSFMHWYQQKPGQPPKLLIYLASN
LESGVPARFSGSGSRTDFTLTIDPVEADDAATYYCHQNNEDPPAFGGGTKLEIKRTV
AAPSVFIFPPSDEQLKSGTASVVCLLNNFYPREAKVQWKVDNALQSGNSQESVTEQD
SKDSTYSLSSTLTLSKADYEKHKVYACEVTHQGLSSPVTKSFNRGEC

[0196] The term “variant” when used in relation to GFRAL or to an anti-GFRAL antibody may refer to a peptide or polypeptide comprising one or more (such as, for example, about 1 to about 25, about 1 to about 20, about 1 to about 15, about 1 to about 10, or about 1 to about 5) amino acid sequence substitutions, deletions, and/or additions as compared to a native or unmodified GFRAL sequence. For example, a GFRAL variant may result from one or more (such as, for example, about 1 to about 25, about 1 to about 20, about 1 to about 15, about 1 to about 10, or about 1 to about 5) changes to an amino acid sequence of a native GFRAL. Also by way of example, a variant of an anti-GFRAL antibody may result from one or more (such as, for example, about 1 to about 25, about 1 to about 20, about 1 to about 15, about 1 to about 10, or about 1 to about 5) changes to an amino acid sequence of a native or previously unmodified anti-GFRAL antibody. Variants may be naturally occurring, such as allelic or splice variants, or may be artificially constructed. Polypeptide variants may be prepared from the corresponding nucleic acid molecules encoding the variants. In some embodiments, the GFRAL variant or anti-GFRAL antibody variant at least retains GFRAL or anti-GFRAL antibody functional activity, respectively. In some embodiments, an anti-GFRAL antibody variant binds GFRAL and/or is antagonistic to GFRAL activity. In some embodiments, an anti-GFRAL antibody variant binds GFRAL and/or is agonistic to GFRAL activity. In some embodiments, the variant is encoded by a single nucleotide polymorphism (SNP) variant of a nucleic acid molecule that encodes GFRAL or anti-GFRAL antibody VH or VL regions or subregions, such as one or more CDRs.

[0197] The term “vector” refers to a substance that is used to carry or include a nucleic acid sequences, including for example, in order to introduce a nucleic acid sequence into a host cell. Vectors applicable for use include, for example, expression vectors, plasmids, phage vectors, viral vectors, episomes and artificial chromosomes, which can include selection sequences or markers operable for stable integration into a host cell's chromosome. Additionally, the vectors can include one or more selectable marker genes and appropriate expression control sequences. Selectable marker genes that can be included, for example, provide resistance to antibiotics or toxins, complement auxotrophic deficiencies, or supply critical nutrients not in the culture media. Expression control sequences can include constitutive and inducible promoters, transcription enhancers, transcription terminators, and the like which are well known in the art. When two or more nucleic acid molecules are to be co-expressed (e.g. both an antibody heavy and light chain or an antibody VH and VL) both nucleic acid molecules can be inserted, for example, into a single expression vector or in separate expression vectors. For single vector expression, the encoding nucleic acids can be operationally linked to one common expression control sequence or linked to different expression control sequences, such as one inducible promoter and one constitutive promoter. The introduction of nucleic acid molecules into a host cell can be confirmed using methods well known in the art. Such methods include, for example, nucleic acid analysis such as Northern blots or polymerase chain reaction (PCR) amplification of mRNA, or immunoblotting for expression of gene products, or other suitable analytical methods to test the expression of an introduced nucleic acid sequence or its corresponding gene product. It is understood by those skilled in the art that the nucleic acid molecules are expressed in a sufficient amount to produce a desired product (e.g. an anti-GFRAL antibody as described herein), and it is further understood that expression levels can be optimized to obtain sufficient expression using methods well known in the art.

[0198] “Antibody-dependent cell-mediated cytotoxicity” or “ADCC” refers to a form of cytotoxicity in which secreted Ig bound onto Fc receptors (FcRs) present on certain cytotoxic cells (e.g., Natural Killer (NK) cells, neutrophils, and macrophages) enable these cytotoxic effector cells to bind specifically to an antigen-bearing target cell and subsequently kill the target cell with cytotoxins. The antibodies “arm” the cytotoxic cells and are absolutely required for such killing. The primary cells for mediating ADCC, NK cells, express FcγRIII only, whereas monocytes express FcγRI, FcγRII and FcγRIII. FcR expression on hematopoietic cells is known (see, e.g., Table 3, page 464, Ravetch and Kinet, Annu. Rev. Immunol. 9:457-92 (1991)). To assess ADCC activity of a molecule of interest, an in vitro ADCC assay, (see, e.g., U.S. Pat. No. 5,500,362 or 5,821,337) may be performed. Useful effector cells for such assays include peripheral blood mononuclear cells (PBMC) and Natural Killer (NK) cells. Alternatively, or additionally, ADCC activity of the molecule of interest may be assessed in vivo, for example, in a animal model (see, e.g., Clynes et al. (USA) 95:652-656 (1998)). Antibodies with little or no ADCC activity may be selected for use.

[0199] “Fc receptor” or “FcR” describes a receptor that binds to the Fc region of an antibody. The preferred FcR is a native sequence human FcR. Moreover, a preferred FcR is one that binds an IgG antibody (e.g., a gamma receptor) and includes receptors of the FcγRI, FcγRII and FcγRIII subclasses, including allelic variants and alternatively spliced forms of these receptors. FcγRII receptors include FcγRIIA (an “activating receptor”) and FcγRIIB (an “inhibiting receptor”), which have similar amino acid sequences that differ primarily in the cytoplasmic domains thereof (see, e.g., review Daëron, Annu. Rev. Immunol. 15:203-234 (1997)). FcRs are known (see, e.g., Ravetch and Kinet, Annu. Rev. Immunol. 9:457-492 (1991); Capel et al., Immunomethods 4:25-34 (1994); and de Haas et al., J. Lab. Clin. Med. 126:330-41 (1995)). Other FcRs, including those to be identified in the future, are encompassed by the term “FcR” herein. The term also includes the neonatal receptor, FcRn, which is responsible for the transfer of maternal IgGs to the fetus (see, e.g., Guyer et al., J. Immunol. 117:587 (1976) and Kim et al., J. Immunol. 24:249 (1994)). Antibody variants with improved or diminished binding to FcRs have been described (see, e.g., in WO 2000/42072; U.S. U.S. Pat. Nos. 7,183,387, 7,332,581 and 7,335,742; Shields et al. J. Biol. Chem. 9 (2): 6591-6604 (2001)).

[0200] “Complement dependent cytotoxicity” or “CDC” refers to the lysis of a target cell in the presence of complement. Activation of the classical complement pathway is initiated by the binding of the first component of the complement system (C1q) to antibodies (of the appropriate subclass) which are bound to their cognate antigen. To assess complement activation, a CDC assay, (see, e.g., Gazzano-Santoro et al., J. Immunol. Methods 202:163 (1996)), may be performed. Polypeptide variants with altered Fc region amino acid sequences (polypeptides with a variant Fc region) and increased or decreased C1q binding capability have been described, (see, e.g., U.S. Pat. No. 6,194,551, WO 1999/51642, Idusogie et al. J. Immunol. 164:4178-4184 (2000)). Antibodies with little or no CDC activity may be selected for use.

[0201] In calculating percent identity, the sequences being compared may be aligned in a way that gives the largest match between the sequences. Computer program may be used to determine percent identity is the GCG program package, which includes GAP (Devereux et al., (1984) Nucl. Acid Res. 12:387; Genetics Computer Group, University of Wisconsin, Madison, Wis.). The computer algorithm GAP used to align the two polypeptides or polynucleotides for which the percent sequence identity is to be determined. The sequences may be aligned for optimal matching of their respective amino acid or nucleotide (the “matched span”, as determined by the algorithm). A gap opening penalty (which is calculated as 3.times. the average diagonal, wherein the “average diagonal” is the average of the diagonal of the comparison matrix being used; the “diagonal” is the score or number assigned to each perfect amino acid match by the particular comparison matrix) and a gap extension penalty (which is usually 1/10 times the gap opening penalty), as well as a comparison matrix such as PAM 250 or BLOSUM 62 are used in conjunction with the algorithm. In certain embodiments, a standard comparison matrix (see, Dayhoff et al., (1978) Atlas of Protein Sequence and Structure 5:345-352 for the PAM 250 comparison matrix; Henikoff et al., (1992) Proc. Natl. Acad. Sci. U.S.A. 89:10915-10919 for the BLOSUM 62 comparison matrix) is also used by the algorithm.

[0202] Examplary parameters for determining percent identity for polypeptides or nucleotide sequences using the GAP program are the following: (i) Algorithm: Needleman et al., 1970, J. Mol. Biol. 48:443-453; (ii) Comparison matrix: BLOSUM 62 from Henikoff et al., 1992, supra; (iii) Gap Penalty: 12 (but with no penalty for end gaps) (iv) Gap Length Penalty: 4; and (v) Threshold of Similarity: 0.

[0203] Certain alignment schemes for aligning two amino acid sequences may result in matching of only a short region of the two sequences, and this small aligned region may have very high sequence identity even though there is no significant relationship between the two full-length sequences. Accordingly, the selected alignment method (e.g., the GAP program) can be adjusted if so desired to result in an alignment that spans a number of amino acids, for example, at least 50 contiguous amino acids of the target polypeptide.

[0204] “Percent (%) amino acid sequence identity” with respect to a reference polypeptide sequence is defined as the percentage of amino acid residues in a candidate sequence that are identical with the amino acid residues in the reference polypeptide sequence, after aligning the sequences and introducing gaps, if necessary, to achieve the maximum percent sequence identity, and not considering any conservative substitutions as part of the sequence identity. Alignment for purposes of determining percent amino acid sequence identity can be achieved in various ways that are within the skill in the art, for instance, using publicly available computer software such as BLAST, BLAST-2, ALIGN or Megalign (DNASTAR) software. Those skilled in the art can determine appropriate parameters for aligning sequences, including any algorithms needed to achieve maximal alignment over the full length of the sequences being compared.

[0205] A “modification” of an amino acid residue/position refers to a change of a primary amino acid sequence as compared to a starting amino acid sequence, wherein the change results from a sequence alteration involving said amino acid residue/positions. For example, typical modifications include substitution of the residue with another amino acid (e.g., a conservative or non-conservative substitution), insertion of one or more (e.g., generally fewer than 5, 4 or 3) amino acids adjacent to said residue/position, and/or deletion of said residue/position.

[0206] An “epitope” is the site on the surface of an antigen molecule to which a single antibody molecule binds, such as a localized region on the surface of an antigen, such as a GFRAL polypeptide, a GFRAL polypeptide fragment or a GFRAL epitope, that is capable of being bound to one or more antigen binding regions of an antibody, and that has antigenic or immunogenic activity in an animal, such as a mammal (e.g., a human), that is capable of eliciting an immune response. An epitope having immunogenic activity is a portion of a polypeptide that elicits an antibody response in an animal. An epitope having antigenic activity is a portion of a polypeptide to which an antibody binds as determined by any method well known in the art, including, for example, by an immunoassay. Antigenic epitopes need not necessarily be immunogenic. Epitopes often consist of chemically active surface groupings of molecules such as amino acids or sugar side chains and have specific three dimensional structural characteristics as well as specific charge characteristics. The term, “epitope” specifically includes linear epitopes and conformational epitopes. A region of a polypeptide contributing to an epitope may be contiguous amino acids of the polypeptide or the epitope may come together from two or more non-contiguous regions of the polypeptide. The epitope may or may not be a three-dimensional surface feature of the antigen. In certain embodiments, a GFRAL epitope is a three-dimensional surface feature of a GFRAL polypeptide. In other embodiments, a GFRAL epitope is linear feature of a GFRAL polypeptide. Generally an antigen has several or many different epitopes and may react with many different antibodies.

[0207] An antibody binds “an epitope” or “essentially the same epitope” or “the same epitope” as a reference antibody, when the two antibodies recognize identical, overlapping or adjacent epitopes in a three-dimensional space. The most widely used and rapid methods for determining whether two antibodies bind to identical, overlapping or adjacent epitopes in a three-dimensional space are competition assays, which can be configured in a number of different formats, for example, using either labeled antigen or labeled antibody. In some assays, the antigen is immobilized on a 96-well plate, or expressed on a cell surface, and the ability of unlabeled antibodies to block the binding of labeled antibodies is measured using radioactive, fluorescent or enzyme labels.

[0208] “Epitope mapping” is the process of identifying the binding sites, or epitopes, of antibodies on their target antigens. Antibody epitopes may be linear epitopes or conformational epitopes. Linear epitopes are formed by a continuous sequence of amino acids in a protein. Conformational epitopes are formed of amino acids that are discontinuous in the protein sequence, but which are brought together upon folding of the protein into its three-dimensional structure. Induced epitopes are formed when the three dimensional structure of the protein is in an altered confirmation, such as following activation or binding of another protein or ligand.

[0209] “Epitope binning” is the process of grouping antibodies based on the epitopes they recognize. More particularly, epitope binning comprises methods and systems for discriminating the epitope recognition properties of different antibodies, using competition assays combined with computational processes for clustering antibodies based on their epitope recognition properties and identifying antibodies having distinct binding specificities.

[0210] A “GFRAL-mediated disease,” “GFRAL-mediated disorder,” and “GFRAL-mediated condition” are used interchangeably and refer to any disease, disorder or condition that is completely or partially caused by or is the result of GFRAL or the interaction of a GFRAL with GDF15 and/or alternatively any disease, disorder, or condition in which it is desirable to inhibit the in vivo effects of GDF15. GFRAL-mediated diseases, disorders, or conditions include GDF15-mediated diseases disorders or conditions.

[0211] A “GDF15-mediated disease,” “GDF15-mediated disorder,” and “GDF15-mediated condition” are used interchangeably and refer to any disease, disorder or condition that is: (i) completely or partially caused by; or (ii) is the result of a GDF15 protein (e.g., an activity of a GDF15 protein, such as GDF15 signaling or elevated levels of a GDF15 protein) or the interaction of a GFRAL protein with a GDF15 protein and/or a RET protein, alternatively any disease, disorder, or condition in which it is desirable to inhibit the in vivo effects of GDF15. GDF15-mediated diseases, disorders, or conditions include involuntary weight loss, cachexia, sarcopenia, muscle wasting, bone wasting, a cardiovascular disease, a chronic inflammatory disease (e.g., chronic renal disease, chronic obstructive pulmonary disease), and a cancer, including a cancer that has decreased sensitivity to (e.g., resistance to) a chemotherapeutic agent (e.g., an anti-tumor antibody such as trastuzumab) that is induced by or related to a GDF15 protein.

[0212] The term “therapeutically effective amount” as used herein refers to the amount of an agent (e.g., an antibody described herein or any other agent described herein) that is sufficient to reduce and/or ameliorate the severity and/or duration of a given disease, disorder or condition, and/or a symptom related thereto. A therapeutically effective amount of a agent, including a therapeutic agent, can be an amount necessary for (i) reduction or amelioration of the advancement or progression of a given disease, disorder, or condition, (ii) reduction or amelioration of the recurrence, development or onset of a given disease, disorder or conditions, and/or (iii) to improve or enhance the prophylactic or therapeutic effect of another therapy (e.g., a therapy other than the administration of an antibody provided herein). A “therapeutically effective amount” of a substance/molecule/agent of the present disclosure (e.g., an anti-GFRAL antibody) may vary according to factors such as the disease state, age, sex, and weight of the individual, and the ability of the substance/molecule/agent, to elicit a desired response in the individual. A therapeutically effective amount encompasses an amount in which any toxic or detrimental effects of the substance/molecule/agent are outweighed by the therapeutically beneficial effects. In certain embodiments, the term “therapeutically effective amount” refers to an amount of an antibody or other agent (e.g., or drug) effective to “treat” a disease, disorder, or condition, in a subject or mammal.

[0213] A “prophylactically effective amount” refers to an amount effective, at dosages and for periods of time necessary, to achieve the desired prophylactic result. Typically, but not necessarily, since a prophylactic dose is used in subjects prior to or at an earlier stage of a disease, disorder, or condition, a prophylactically effective amount may be less than a therapeutically effective amount.

[0214] “Chronic” administration refers to administration of the agent(s) in a continuous mode (e.g., for a period of time such as days, weeks, months or years) as opposed to an acute mode, so as to maintain the initial therapeutic effect (activity) for an extended period of time. “Intermittent” administration is treatment that is not consecutively done without interruption, but rather is cyclic in nature.

[0215] Administration “in combination with” one or more further agents includes simultaneous (e.g., concurrent) and consecutive administration in any order. The term “in combination” in the context of the administration of other therapies (e.g., other agents) includes the use of more than one therapy (e.g., one agent). The use of the term “in combination” does not restrict the order in which therapies are administered to a subject. A first therapy (e.g., agent) can be administered before (e.g., 1 minute, 15 minutes, 30 minutes, 45 minutes, 1 hour, 2 hours, 3 hours, 4 hours, 5 hours, 6 hours, 7 hours, 8 hours, 12 hours, 24 hours, 48 hours, 72 hours, 96 hours, 1 week, 2 weeks, 3 weeks, 4 weeks, 5 weeks, 6 weeks, 8 weeks, 8 weeks, 9 weeks, 10 weeks, 11 weeks, or 12 weeks), concurrently, or after (e.g., 1 minute, 15 minutes, 30 minutes, 45 minutes, 1 hour, 2 hours, 3 hours, 4 hours, 5 hours, 6 hours, 7 hours, 8 hours, 12 hours, 24 hours, 48 hours, 72 hours, 96 hours, 1 week, 2 weeks, 3 weeks, 4 weeks, 5 weeks, 6 weeks, 7 weeks, 8 weeks, 9 weeks, 10 weeks, 11 weeks, or 12 weeks) the administration of a second therapy (e.g., agent) to a subject which had, has, or is susceptible to or has a risk of a GDF15-mediated disease, disorder or condition.

[0216] Any additional therapy (e.g., agent) can be administered in any order with the other additional therapies (e.g., agents). In certain embodiments, the antibodies can be administered in combination with one or more therapies such as agents (e.g., therapies, including agents, that are not the antibodies that are currently administered) to prevent, treat, manage, and/or ameliorate a GDF15-mediated disease, disorder or condition, or a symptom thereof. Non-limiting examples of therapies (e.g., agents) that can be administered in combination with an antibody include, for example, analgesic agents, anesthetic agents, antibiotics, or immunomodulatory agents or any other agent listed in the U.S. Pharmacopoeia and/or Physician's Desk Reference. Examples of agents useful in combination therapy include, but are not limited to, the following: non-steroidal anti-inflammatory drug (NSAID) such as aspirin, ibuprofen, and other propionic acid derivatives (alminoprofen, benoxaprofen, bucloxic acid, carprofen, fenbufen, fenoprofen, fluprofen, flurbiprofen, indoprofen, ketoprofen, miroprofen, naproxen, oxaprozin, pirprofen, pranoprofen, suprofen, tiaprofenic acid, and tioxaprofen), acetic acid derivatives (indomethacin, acemetacin, alclofenac, clidanac, diclofenac, fenclofenac, fenclozic acid, fentiazac, fuirofenac, ibufenac, isoxepac, oxpinac, sulindac, tiopinac, tolmetin, zidometacin, and zomepirac), fenamic acid derivatives (flufenamic acid, meclofenamic acid, mefenamic acid, niflumic acid and tolfenamic acid), biphenylcarboxylic acid derivatives (diflunisal and flufenisal), oxicams (isoxicam, piroxicam, sudoxicam and tenoxican), salicylates (acetyl salicylic acid, sulfasalazine) and the pyrazolones (apazone, bezpiperylon, feprazone, mofebutazone, oxyphenbutazone, phenylbutazone). Other combinations include cyclooxygenase-2 (COX-2) inhibitors. Other agents for combination include steroids such as prednisolone, prednisone, methylprednisolone, betamethasone, dexamethasone, or hydrocortisone. Such a combination may be especially advantageous, since one or more side-effects of the steroid can be reduced or even eliminated by tapering the steroid dose required when treating subjects in combination with the present antibodies. Additional examples of agents for combinations include cytokine suppressive anti-inflammatory drug(s) (CSAIDs); antibodies to or antagonists of other human cytokines or growth factors, for example, TNF, LT, IL-1β, IL-2, IL-6, IL-7, IL-8, IL-15, IL-16, IL-18, EMAP-II, GM-CSF, FGF, or PDGF. Combinations of agents may include TNF antagonists like chimeric, humanized or human TNF antibodies, REMICADE, anti-TNF antibody fragments (e.g., CDP870), and soluble p55 or p75 TNF receptors, derivatives thereof, p75TNFRIgG (ENBREL®) or p55TNFR1gG (LENERCEPT®), soluble IL-13 receptor (sIL-13), and also TNFα converting enzyme (TACE) inhibitors; similarly IL-1 inhibitors (e.g., Interleukin-1-converting enzyme inhibitors) may be effective. Other combinations include Interleukin 11, anti-P7s and p-selectin glycoprotein ligand (PSGL). Other examples of agents useful in combination therapy include interferon-β1a (AVONEX); interferon-β1b (BETASERON®); copaxone; hyperbaric oxygen; intravenous immunoglobulin; clabribine; and antibodies to or antagonists of other human cytokines or growth factors (e.g., antibodies to CD40 ligand and CD80).

[0217] “Carriers” as used herein include pharmaceutically acceptable carriers, excipients, or stabilizers that are nontoxic to the cell or mammal being exposed thereto at the dosages and concentrations employed. Often the physiologically acceptable carrier is an aqueous pH buffered solution. Examples of physiologically acceptable carriers include buffers such as phosphate, citrate, and other organic acids; antioxidants including ascorbic acid; low molecular weight ((e.g., less than about 10 amino acid residues) polypeptide; proteins, such as serum albumin, gelatin, or immunoglobulins; hydrophilic polymers such as polyvinylpyrrolidone; amino acids such as glycine, glutamine, asparagine, arginine or lysine; monosaccharides, disaccharides, and other carbohydrates including glucose, mannose, or dextrins; chelating agents such as EDTA; sugar alcohols such as mannitol or sorbitol; salt-forming counterions such as sodium; and/or nonionic surfactants such as TWEEN™, polyethylene glycol (PEG), and PLURONICS™. The term “carrier” can also refer to a diluent, adjuvant (e.g., Freund's adjuvant (complete or incomplete)), excipient, or vehicle with which the therapeutic is administered. Such carriers, including pharmaceutical carriers, can be sterile liquids, such as water and oils, including those of petroleum, animal, vegetable or synthetic origin, such as peanut oil, soybean oil, mineral oil, sesame oil and the like. Water is a exemplary carrier when a composition (e.g., a pharmaceutical composition) is administered intravenously. Saline solutions and aqueous dextrose and glycerol solutions can also be employed as liquid carriers, particularly for injectable solutions. Suitable excipients (e.g., pharmaceutical excipients) include starch, glucose, lactose, sucrose, gelatin, malt, rice, flour, chalk, silica gel, sodium stearate, glycerol monostearate, talc, sodium chloride, dried skim milk, glycerol, propylene, glycol, water, ethanol and the like. The composition, if desired, can also contain minor amounts of wetting or emulsifying agents, or pH buffering agents. Compositions can take the form of solutions, suspensions, emulsion, tablets, pills, capsules, powders, sustained-release formulations and the like. Oral compositions, including formulations, can include standard carriers such as pharmaceutical grades of mannitol, lactose, starch, magnesium stearate, sodium saccharine, cellulose, magnesium carbonate, etc. Examples of suitable pharmaceutical carriers are described in Remington's Pharmaceutical Sciences (1990) Mack Publishing Co., Easton, PA. Compositions, including pharmaceutical compounds, may contain a prophylactically or therapeutically effective amount of an anti-GFRAL antibody, for example, in isolated or purified form, together with a suitable amount of carrier so as to provide the form for proper administration to the subject (e.g., patient). The formulation should suit the mode of administration.

[0218] The term “pharmaceutically acceptable” as used herein means being approved by a regulatory agency of the Federal or a state government, or listed in the U.S. Pharmacopeia, European Pharmacopeia or other generally recognized Pharmacopeia for use in animals, and more particularly in humans.

[0219] The term “pharmaceutical formulation” refers to a preparation which is in such form as to permit the biological activity of the active ingredient (e.g., an anti-GFRAL antibody) to be effective, and which contains no additional components which are unacceptably toxic to a subject to which the formulation would be administered. Such formulation may be sterile.

[0220] A “sterile” formulation is aseptic or free from all living microorganisms and their spores.

[0221] “Polyclonal antibodies” as used herein refers to an antibody population generated in an immunogenic response to a protein having many epitopes and thus includes a variety of different antibodies directed to the same and to different epitopes within the protein. Methods for producing polyclonal antibodies are known in the art (See, e.g., Chapter 11 in: Short Protocols in Molecular Biology, (2002) 5th Ed., Ausubel et al., eds., John Wiley and Sons, New York).

[0222] An “isolated nucleic acid” is a nucleic acid, for example, an RNA, DNA, or a mixed polymer, which is substantially separated from other genome DNA sequences as well as proteins or complexes such as ribosomes and polymerases, which naturally accompany a native sequence. An “isolated” nucleic acid molecule is one which is separated from other nucleic acid molecules which are present in the natural source of the nucleic acid molecule. Moreover, an “isolated” nucleic acid molecule, such as a cDNA molecule, can be substantially free of other cellular material, or culture medium when produced by recombinant techniques, or substantially free of chemical precursors or other chemicals when chemically synthesized. In a specific embodiment, one or more nucleic acid molecules encoding an antibody as described herein are isolated or purified. The term embraces nucleic acid sequences that have been removed from their naturally occurring environment, and includes recombinant or cloned DNA isolates and chemically synthesized analogues or analogues biologically synthesized by heterologous systems. A substantially pure molecule may include isolated forms of the molecule.

[0223] “Polynucleotide,” or “nucleic acid,” as used interchangeably herein, refer to polymers of nucleotides of any length, and include DNA and RNA. The nucleotides can be deoxyribonucleotides, ribonucleotides, modified nucleotides or bases, and/or their analogs, or any substrate that can be incorporated into a polymer by DNA or RNA polymerase or by a synthetic reaction. A polynucleotide may comprise modified nucleotides, such as methylated nucleotides and their analogs. “Oligonucleotide,” as used herein, generally refers to short, generally single-stranded, generally synthetic polynucleotides that are generally, but not necessarily, less than about 200 nucleotides in length. The terms “oligonucleotide” and “polynucleotide” are not mutually exclusive. The description above for polynucleotides is equally and fully applicable to oligonucleotides. A cell that produces an anti-GFRAL antibody of the present disclosure may include a parent hybridoma cell, as well as bacterial and eukaryotic host cells into which nucleic acid encoding the antibodies have been introduced. Suitable host cells are disclosed below.

[0224] As used herein, the terms “treat,” “treatment” and “treating” refer to the reduction or amelioration of the progression, severity, and/or duration of a GDF15-mediated disease, disorder or condition resulting from the administration of one or more therapies (including, but not limited to, the administration of one or more prophylactic or therapeutic agents, such as an antibody provided herein). In some embodiments, the agent is an anti-GFRAL antibody. Treatment as used herein includes, but is not limited to, (i) increase body weight; (ii) maintain body weight; (iii) reduce body weight loss; (iv) increase body mass (e.g., lean mass or fat mass); (v) maintain body mass (e.g., lean mass or fat mass); (vi) reduce loss of body mass (e.g., lean mass or fat mass), or any combination thereof.

[0225] As used herein, the term “prophylactic agent” refers to any agent that can totally or partially inhibit the development, recurrence, onset or spread of a GDF15-mediated disease, disorder or condition and/or symptom related thereto in a subject. In some embodiments, the term “prophylactic agent” refers to an antibody provided herein. In some embodiments, the term “prophylactic agent” refers to an agent other than an antibody provided herein. In some embodiments, a prophylactic agent is an agent which is known to be useful to or has been or is currently being used to prevent a GDF15-mediated disease, disorder or condition and/or a symptom related thereto or impede the onset, development, progression and/or severity of a GDF15-mediated disease, disorder or condition and/or a symptom related thereto. In some embodiments, the prophylactic agent is a fully human anti-GFRAL antibody, such as a fully human anti-GFRAL monoclonal antibody.

[0226] The term “prophylactic agent” refers to any agent that can totally or partially inhibit the development, recurrence, onset or spread of a GDF15-mediated disease, disorder or condition, or a symptom thereof in a subject. In certain embodiments, the term “prophylactic agent” refers to an anti-GFRAL antibody as described herein. In certain other embodiments, the term “prophylactic agent” refers to an agent other than an anti-GFRAL antibody as described herein. In certain embodiments, a prophylactic agent is an agent which is known to be useful to or has been or is currently being used to prevent a GDF15-mediated disease, disorder or condition, or a symptom thereof or impede the onset, development, progression and/or severity of a GDF15-mediated disease, disorder or condition, or a symptom thereof. In specific embodiments, the prophylactic agent is a humanized anti-GFRAL antibody, such as a humanized anti-GFRAL monoclonal antibody.

[0227] The term “package insert” is used to refer to instructions customarily included in commercial packages of therapeutic products, that contain information about the indications, usage, dosage, administration, contraindications and/or warnings concerning the use of such therapeutic products.

[0228] The terms “prevent,” “preventing,” and “prevention” refer to the total or partial inhibition of the development, recurrence, onset or spread of a GDF15-mediated disease, disorder or condition, or a symptom thereof, resulting from the administration of a therapy or combination of therapies provided herein (e.g., a combination of prophylactic or therapeutic agents, such as an antibody provided herein).

[0229] The term “recombinant antibody” refers to an antibody that is prepared, expressed, created or isolated by recombinant means. Recombinant antibodies can be antibodies expressed using a recombinant expression vector transfected into a host cell, antibodies isolated from a recombinant, combinatorial antibody library, antibodies isolated from an animal (e.g., a mouse or cow) that is transgenic and/or transchromosomal for human immunoglobulin genes (see, e.g., Taylor, L. D. et al. (1992) Nucl. Acids Res. 20:6287-6295) or antibodies prepared, expressed, created or isolated by any other means that involves splicing of immunoglobulin gene sequences to other DNA sequences. Such recombinant antibodies can have variable and constant regions, including those derived from human germline immunoglobulin sequences (See Kabat, E. A. et al. (1991) Sequences of Proteins of Immunological Interest, Fifth Edition, U.S. Department of Health and Human Services, NIH Publication No. 91-3242). In certain embodiments, however, such recombinant antibodies may be subjected to in vitro mutagenesis (or, when an animal transgenic for human Ig sequences is used, in vivo somatic mutagenesis) and thus the amino acid sequences of the VH and VL regions of the recombinant antibodies are sequences that, while derived from and related to human germline VH and VL sequences, may not naturally exist within the human antibody germline repertoire in vivo.

[0230] The term “side effects” encompasses unwanted and adverse effects of a therapy (e.g., a prophylactic or therapeutic agent). Unwanted effects are not necessarily adverse. An adverse effect from a therapy (e.g., a prophylactic or therapeutic agent) might be harmful or uncomfortable or risky. Examples of side effects include, diarrhea, cough, gastroenteritis, wheezing, nausea, vomiting, anorexia, abdominal cramping, fever, pain, loss of body weight, dehydration, alopecia, dyspenea, insomnia, dizziness, mucositis, nerve and muscle effects, fatigue, dry mouth, and loss of appetite, rashes or swellings at the site of administration, flu-like symptoms such as fever, chills and fatigue, digestive tract problems and allergic reactions. Additional undesired effects experienced by patients are numerous and known in the art. Many are described in the Physician's Desk Reference (60^{th} ed., 2006).

[0231] The terms “subject” and “patient” are used interchangeably herein and, in the context of the methods disclosed herein, refer to an animal that is the recipient of a therapy or preventive case. As used herein, in certain embodiments, a subject is a mammal, such as a non-primate (e.g., cows, pigs, horses, cats, dogs, rats, etc.) or a primate (e.g., monkey and human). In specific embodiments, the subject is a human. In one embodiment, the subject is a mammal (e.g., a human) having a GDF15-mediated disease, disorder or condition. In another embodiment, the subject is a mammal (e.g., a human) at risk of developing a GDF15-mediated disease, disorder or condition.

[0232] “Substantially all” refers to refers to at least about 60%, at least about 65%, at least about 70%, at least about 75%, at least about 80%, at least about 85%, at least about 90%, at least about 95%, at least about 96%, at least about 97%, at least about 98%, at least about 99%, or about 100%.

[0233] The term “therapeutic agent” refers to any agent that can be used in treating, preventing or alleviating a disease, disorder or condition, including in the treatment, prevention or alleviation of one or more symptoms of a GDF15-mediated disease, disorder or condition, or a symptom thereof. In certain embodiments, a therapeutic agent refers to an anti-GFRAL antibody as described herein. In certain other embodiments, a therapeutic agent refers to an agent other than an antibody provided herein. In certain embodiments, a therapeutic agent is an agent which is known to be useful for, or has been or is currently being used for the treatment, prevention or alleviation of one or more symptoms of a GDF15-mediated disease, disorder or condition, or a symptom thereof.

[0234] The combination of therapies (e.g., use of prophylactic or therapeutic agents) which is more effective than the additive effects of any two or more single therapy. For example, a synergistic effect of a combination of prophylactic and/or therapeutic agents permits the use of lower dosages of one or more of the agents and/or less frequent administration of the agents to a subject with a GDF15-mediated disease, disorder or condition. The ability to utilize lower dosages of prophylactic or therapeutic therapies and/or to administer the therapies less frequently reduces the toxicity associated with the administration of the therapies to a subject without reducing the efficacy of the therapies in the prevention, management, treatment or amelioration of a GDF15-mediated disease, disorder or condition. In addition, a synergistic effect can result in improved efficacy of therapies in the prevention, or in the management, treatment or amelioration of a GDF15-mediated disease, disorder or condition. Finally, synergistic effect of a combination of therapies (e.g., prophylactic or therapeutic agents) can avoid or reduce adverse or unwanted side effects associated with the use of any single therapy. In some embodiments, the combination therapy comprises an antibody provided herein and insulin (e.g., insulin supplementation). In some embodiments, the combination therapy comprises an-anti-GFRAL antibody and insulin, wherein the combination therapy comprises insulin at a lower daily dosage than the normal daily dosage in an insulin-only therapy. In some embodiments, the combination therapy comprises, e.g., less than 90%, less than 80%, less than 70%, less than 60%, less than 50%, less than 40%, less than 30%, less than 20%, less than 15%, less than 10%, less than 5%, less than 3%, or less than 1% of the normal daily insulin dosage in an insulin-only therapy.

[0235] The term “therapy” refers to any protocol, method and/or agent that can be used in the prevention, management, treatment and/or amelioration of a GDF15-mediated disease, disorder or condition (e.g., type 1 diabetes or type 2 diabetes). In some embodiments, the terms “therapies” and “therapy” refer to a biological therapy, supportive therapy, and/or other therapies useful in the prevention, management, treatment and/or amelioration of a GDF15-mediated disease, disorder or condition known to one of skill in the art such as medical personnel.

[0236] The term “detectable probe” refers to a composition that provides a detectable signal. The term includes, without limitation, any fluorophore, chromophore, radiolabel, enzyme, antibody or antibody fragment, and the like, that provide a detectable signal via its activity.

[0237] The term “diagnostic agent” refers to a substance administered to a subject that aids in the diagnosis of a disease, disorder, or conditions. Such substances can be used to reveal, pinpoint, and/or define the localization of a disease causing process. In certain embodiments, a diagnostic agent includes a substance that is conjugated to an anti-GFRAL antibody as described herein, that when administered to a subject or contacted to a sample from a subject aids in the diagnosis a GDF15-mediated disease, disorder or condition.

[0238] The term “detectable agent” refers to a substance that can be used to ascertain the existence or presence of a desired molecule, such as an anti-GFRAL antibody as described herein, in a sample or subject. A detectable agent can be a substance that is capable of being visualized or a substance that is otherwise able to be determined and/or measured (e.g., by quantitation).

[0239] The term “encode” or grammatical equivalents thereof as it is used in reference to nucleic acid molecule refers to a nucleic acid molecule in its native state or when manipulated by methods well known to those skilled in the art that can be transcribed to produce mRNA, which is then translated into a polypeptide and/or a fragment thereof. The antisense strand is the complement of such a nucleic acid molecule, and the encoding sequence can be deduced therefrom.

[0240] The term “excipient” refers to an inert substance which is commonly used as a diluent, vehicle, preservative, binder, or stabilizing agent, and includes, but not limited to, proteins (e.g., serum albumin, etc.), amino acids (e.g., aspartic acid, glutamic acid, lysine, arginine, glycine, histidine, etc.), fatty acids and phospholipids (e.g., alkyl sulfonates, caprylate, etc.), surfactants (e.g., SDS, polysorbate, nonionic surfactant, etc.), saccharides (e.g., sucrose, maltose, trehalose, etc.) and polyols (e.g., mannitol, sorbitol, etc.). See, also, Remington's Pharmaceutical Sciences (1990) Mack Publishing Co., Easton, PA, which is hereby incorporated by reference in its entirety.

[0241] In the context of a peptide or polypeptide, the term “fragment” as used herein refers to a peptide or polypeptide that comprises less than the full length amino acid sequence. Such a fragment may arise, for example, from a truncation at the amino terminus, a truncation at the carboxy terminus, and/or an internal deletion of a residue(s) from the amino acid sequence. Fragments may, for example, result from alternative RNA splicing or from in vivo protease activity. In certain embodiments, fragments include polypeptides comprising an amino acid sequence of at least 5 contiguous amino acid residues, at least 10 contiguous amino acid residues, at least 15 contiguous amino acid residues, at least 20 contiguous amino acid residues, at least 25 contiguous amino acid residues, at least 40 contiguous amino acid residues, at least 50 contiguous amino acid residues, at least 60 contiguous amino residues, at least 70 contiguous amino acid residues, at least 80 contiguous amino acid residues, at least 90 contiguous amino acid residues, at least contiguous 100 amino acid residues, at least 125 contiguous amino acid residues, at least 150 contiguous amino acid residues, at least 175 contiguous amino acid residues, at least 200 contiguous amino acid residues, at least 250, at least 300, at least 350, at least 400, at least 450, at least 500, at least 550, at least 600, at least 650, at least 700, at least 750, at least 800, at least 850, at least 900, or at least 950, contiguous amino acid residues of the amino acid sequence of a GFRAL polypeptide or an antibody that binds to a GFRAL polypeptide. In some embodiments, a fragment of an antibody that binds to a GFRAL polypeptide retains at least 1, at least 2, or at least 3 or more functions of the antibody.

[0242] The terms “manage,” “managing,” and “management” refer to the beneficial effects that a subject derives from a therapy (e.g., a prophylactic or therapeutic agent), which does not result in a cure of the disease. In certain embodiments, a subject is administered one or more therapies (e.g., prophylactic or therapeutic agents, such as an antibody provided herein) to “manage” a GDF15-mediated disease, disorder or condition, or a symptom thereof, so as to prevent the progression or worsening of the disease.

[0243] “Administer” or “administration” refers to the act of injecting or otherwise physically delivering a substance as it exists outside the body (e.g., an anti-GFRAL antibody as described herein) into a subject, such as by mucosal, intradermal, intravenous, intramuscular delivery and/or any other method of physical delivery described herein or known in the art. When a disease, disorder, or condition, or a symptom thereof, is being treated, administration of the substance typically occurs after the onset of the disease, disorder, or condition, or symptoms thereof. When a disease, disorder, or condition or symptoms thereof, are being prevented, administration of the substance typically occurs before the onset of the disease, disorder, or condition, or symptoms thereof.

[0244] In the context of a polypeptide, the term “analog” as used herein refers to a polypeptide that possesses a similar or identical function as a GFRAL polypeptide, a fragment of a GFRAL polypeptide, or an anti-GFRAL antibody but does not necessarily comprise a similar or identical amino acid sequence of a GFRAL polypeptide, a fragment of a GFRAL polypeptide, or an anti-GFRAL antibody, or possess a similar or identical structure of a GFRAL polypeptide, a fragment of a GFRAL polypeptide, or an anti-GFRAL antibody. A polypeptide that has a similar amino acid sequence refers to a polypeptide that satisfies at least one of the following: (a) a polypeptide having an amino acid sequence that is at least 30%, at least 35%, at least 40%, at least 45%, at least 50%, at least 55%, at least 60%, at least 65%, at least 70%, at least 75%, at least 80%, at least 85%, at least 90%, at least 95%, or at least 99% identical to the amino acid sequence of a GFRAL polypeptide (e.g., SEQ ID NO:500, a fragment of a GFRAL polypeptide, or an anti-GFRAL antibody described herein; (b) a polypeptide encoded by a nucleotide sequence that hybridizes under stringent conditions to a nucleotide sequence encoding a GFRAL polypeptide, a fragment of a GFRAL polypeptide, or an anti-GFRAL antibody (or VH or VL region thereof) described herein of at least 5 amino acid residues, at least 10 amino acid residues, at least 15 amino acid residues, at least 20 amino acid residues, at least 25 amino acid residues, at least 40 amino acid residues, at least 50 amino acid residues, at least 60 amino residues, at least 70 amino acid residues, at least 80 amino acid residues, at least 90 amino acid residues, at least 100 amino acid residues, at least 125 amino acid residues, or at least 150 amino acid residues (see, e.g., Sambrook et al. (2001) Molecular Cloning: A Laboratory Manual, Cold Spring Harbor Laboratory Press, Cold Spring Harbor, NY; Maniatis et al. (1982) Molecular Cloning: A Laboratory Manual, Cold Spring Harbor Press, Cold Spring Harbor, NY); and (c) a polypeptide encoded by a nucleotide sequence that is at least 30%, at least 35%, at least 40%, at least 45%, at least 50%, at least 55%, at least 60%, at least 65%, at least 70%, at least 75%, at least 80%, at least 85%, at least 90%, at least 95%, or at least 99% identical to the nucleotide sequence encoding a GFRAL polypeptide, a fragment of a GFRAL polypeptide, or an anti-GFRAL antibody (or VH or VL region thereof) described herein. A polypeptide with similar structure to a GFRAL polypeptide, a fragment of a GFRAL polypeptide, or an anti-GFRAL antibody described herein refers to a polypeptide that has a similar secondary, tertiary or quaternary structure of a GFRAL polypeptide, a fragment of a GFRAL, or a GFRAL antibody described herein. The structure of a polypeptide can determined by methods known to those skilled in the art, including but not limited to, X-ray crystallography, nuclear magnetic resonance, and crystallographic electron microscopy.

[0245] The term “composition” is intended to encompass a product containing the specified ingredients (e.g., an antibody provided herein) in, optionally, the specified amounts, as well as any product which results, directly or indirectly, from combination of the specified ingredients in, optionally, the specified amounts.

[0246] In the context of a polypeptide, the term “derivative” as used herein refers to a polypeptide that comprises an amino acid sequence of a GFRAL polypeptide, a fragment of a GFRAL polypeptide, or an antibody that binds to a GFRAL polypeptide which has been altered by the introduction of amino acid residue substitutions, deletions or additions. The term “derivative” as used herein also refers to a GFRAL polypeptide, a fragment of a GFRAL polypeptide, or an antibody that binds to a GFRAL polypeptide which has been chemically modified, e.g., by the covalent attachment of any type of molecule to the polypeptide. For example, but not by way of limitation, a GFRAL polypeptide, a fragment of a GFRAL polypeptide, or a GFRAL antibody may be chemically modified, e.g., by glycosylation, acetylation, pegylation, phosphorylation, amidation, derivatization by known protecting/blocking groups, proteolytic cleavage, linkage to a cellular ligand or other protein, etc. The derivatives are modified in a manner that is different from naturally occurring or starting peptide or polypeptides, either in the type or location of the molecules attached. Derivatives further include deletion of one or more chemical groups which are naturally present on the peptide or polypeptide. A derivative of a GFRAL polypeptide, a fragment of a GFRAL polypeptide, or a GFRAL antibody may be chemically modified by chemical modifications using techniques known to those of skill in the art, including, but not limited to specific chemical cleavage, acetylation, formulation, metabolic synthesis of tunicamycin, etc. Further, a derivative of a GFRAL polypeptide, a fragment of a GFRAL polypeptide, or a GFRAL antibody may contain one or more non-classical amino acids. A polypeptide derivative possesses a similar or identical function as a GFRAL polypeptide, a fragment of a GFRAL polypeptide, or a GFRAL antibody described herein.

[0247] The term “involuntary body weight loss” refers to the unintended loss of body weight that is observed in many conditions such as cachexia, liver cirrhosis, hyperthyroidism, chronic kidney disease, Parkinson's disease, cancer, eating disorder, and sarcopenia.

[0248] The term “cachexia” refers to wasting syndrome that is marked with loss of weight, muscle atrophy, fatigue, weakness, and significant loss of appetite in someone who is not actively trying to lose weight. Cachexia can greatly contribute to morbidity of patients suffering from some chronic diseases (e.g., cancer, chronic renal disease, chronic inflammatory disease, muscle wasting, such as muscular dystrophy, and anorexia nervosa). For example, in late stage cancer, cachexia is common (occurring in most terminally ill cancer patients), and is responsible for about a quarter of all cancer-related deaths.

### Compositions and Methods of Making the Same

[0249] Binding proteins such as antibodies that bind to GFRAL (e.g., human GFRAL) are provided. Antibodies of the present disclosure are useful, for example, for the diagnosis or treatment of GDF15-mediated diseases, disorders, or conditions. In certain embodiments, antibodies of the present disclosure are useful for the diagnosis or treatment of a disease, disorder, or condition, such as involuntary body weight loss, including, but not limited to, involuntary body weight loss in a subject suffering from cachexia or a chronic disease (e.g., liver cirrhosis, hyperthyroidism, Parkinson's disease, cancer, chronic renal disease, chronic obstructive pulmonary disease, AIDS, tuberculosis, chronic inflammatory disease, sepsis, muscle wasting, and anorexia nervosa) or broadly any disease, disorder, or condition in which it is desirable to inhibit the in vivo effects of GDF15.

[0250] Provided herein are antibodies (e.g., monoclonal antibodies) that bind to a GFRAL polypeptide, a GFRAL polypeptide fragment, GFRAL peptide, or a GFRAL epitope. In some embodiments, the anti-GFRAL antibodies bind to the extracellular domain (ECD) of GFRAL. Also provided are antibodies that competitively block an anti-GFRAL antibody provided herein from binding to a GFRAL polypeptide. The anti-GFRAL antibodies provided herein can also be conjugated or recombinantly fused to a diagnostic agent, detectable agent or therapeutic agent. Further provided are compositions comprising an anti-GFRAL antibody.

[0251] Also provided herein are isolated nucleic acid molecules encoding an immunoglobulin heavy chain, light chain, VH region, VL region, VH CDR1, VH CDR2, VH CDR3, VL CDR1, VL CDR2, and/or VL CDR3 of anti-GFRAL antibodies that bind to a GFRAL polypeptide, a GFRAL polypeptide fragment, a GFRAL peptide or a GFRAL epitope. Further provided are vectors and host cells comprising nucleic acid molecules encoding anti-GFRAL antibodies that bind to a GFRAL polypeptide, a GFRAL polypeptide fragment, a GFRAL peptide or a GFRAL epitope. Also provided are methods of making antibodies that bind to a GFRAL polypeptide, a GFRAL polypeptide fragment, a GFRAL peptide or a GFRAL epitope.

[0252] Methods of using the anti-GFRAL antibodies are provided herein. The methods include treating, preventing or alleviating a GDF15-mediated disease, disorder or condition, including treating, preventing or alleviating one or more symptoms of a GDF15-mediated disease, disorder or condition in a subject (e.g., patient). Non limiting examples of GDF15-mediated diseases, disorders, or conditions include involuntary weight loss, a waisting disease, involuntary body weight loss in a subject suffering from cachexia or a chronic disease (e.g., liver cirrhosis, hyperthyroidism, Parkinson's disease, cancer, chronic renal disease, chronic obstructive pulmonary disease, AIDS, tuberculosis, chronic inflammatory disease, sepsis, muscle wasting, and anorexia nervosa). Other of diseases, disorders, or conditions in which a subject can suffer from involuntary weight loss include eating disorders, muscular dystrophy or multiple sclerosis.

### Anti-GFRAL Antibodies

[0253] In some embodiments, the present disclosure provides anti-GFRAL antibodies that may find use herein as therapeutic agents. Exemplary antibodies include polyclonal, monoclonal, humanized, human, bispecific, and heteroconjugate antibodies, as well as variants thereof having improved affinity or other properties.

[0254] In some embodiments, provided herein are antibodies that bind to GFRAL, including a GFRAL polypeptide, a GFRAL polypeptide fragment, a GFRAL peptide or a GFRAL epitope. In some embodiments the anti-GFRAL antibodies are humanized antibodies (e.g., comprising human constant regions) that bind GFRAL, including GFRAL polypeptide, a GFRAL polypeptide fragment, a GFRAL peptide or a GFRAL epitope.

[0255] In some embodiments, an anti-GFRAL antibody comprises a VH region, VL region, VH CDR1, VH CDR2, VH CDR3, VL CDR1, VL CDR2, and/or VL CDR3 of any one of the monoclonal antibodies described herein (e.g., 1C1, 3P10, 12A3, 5F12, 5A20, 8D8, 17J16, 25M22, 2B8, 22N5, 2I23, 6N16, 1B3, 19K19, 2B3, 8C10, 2A9, 24G2, 6G9, 2B11, 1A3, P1B6, P1H8, or P8G4), such as an amino acid sequence depicted in Tables 1-24. Accordingly, in some embodiments, the isolated antibody or functional fragment thereof provided herein comprises one, two, and/or three heavy chain CDRs and/or one, two, and/or three light chain CDRs from: (a) the antibody designated 1C1; (b) the antibody designated 3P10; (c) the antibody designated 12A3; (d) the antibody designated 5F12; (e) the antibody designated 5A20; (f) the antibody designated 8D8; (g) the antibody designated 17J16; (h) t the antibody designated 25M22; (i) the antibody designated 2B8; (j) the antibody designated 22N5; (k) the antibody designated 2I23; (I) the antibody designated 6N16; (m) the antibody designated 1B3; (n) the antibody designated 19K19; (o) the antibody designated 2B3; (p) the antibody designated 8C10; (q) the antibody designated 2A9; (r) the antibody designated 24G2; (s) the antibody designated 6G9; (t) the antibody designated 2B11; (u) the antibody designated 1A3; (v) the antibody designated P1B6; (w) the antibody designated P1H8; (x) the antibody designated P8G4; or the antibody designated 1C1 to P8G4, as shown in Tables 1-24.

[0256] The antibody designated 1C1 comprises a VH sequence that is SEQ ID NO: 1 and a VL sequence that is SEQ ID NO: 2.

[0257] The antibody designated 3P10 comprises a VH sequence that is SEQ ID NO: 3 and a VL sequence that is SEQ ID NO: 4,

[0258] The antibody designated 12A3 comprises a VH sequence that is SEQ ID NO: 5 and a VL sequence that is SEQ ID NO: 6.

[0259] The antibody designated 5F12 comprises a VH sequence that is SEQ ID NO: 7 and a VL sequence that is SEQ ID NO: 8.

[0260] The antibody designated 5A20 comprises a VH sequence that is SEQ ID NO: 9 and a VL sequence that is SEQ ID NO: 10.

[0261] The antibody designated 8D8 comprises a VH sequence that is SEQ ID NO: 11 and a VL sequence that is SEQ ID NO: 12.

[0262] The antibody designated 17J16 comprises a VH sequence that is SEQ ID NO: 13 and a VL sequence that is SEQ ID NO: 14.

[0263] The antibody designated 25M22 comprises a VH sequence that is SEQ ID NO: 15 and a VL sequence that is SEQ ID NO: 16.

[0264] The antibody designated 2B8 comprises a VH sequence that is SEQ ID NO: 17 and a VL sequence that is SEQ ID NO: 18.

[0265] The antibody designated 22N5 comprises a VH sequence that is SEQ ID NO: 19 and a VL sequence that is SEQ ID NO: 20.

[0266] The antibody designated 2I23 comprises a VH sequence that is SEQ ID NO: 21 and a VL sequence that is SEQ ID NO: 22.

[0267] The antibody designated 6N16 comprises a VH sequence that is SEQ ID NO: 23 and a VL sequence that is SEQ ID NO: 24.

[0268] The antibody designated 1B3 comprises a VH sequence that is SEQ ID NO: 25 and a VL sequence that is SEQ ID NO: 26.

[0269] The antibody designated 19K19 comprises a VH sequence that is SEQ ID NO: 27 and a VL sequence that is SEQ ID NO: 28.

[0270] The antibody designated 2B3 comprises a VH sequence that is SEQ ID NO: 29 and a VL sequence that is SEQ ID NO: 30.

[0271] The antibody designated 8C10 comprises a VH sequence that is SEQ ID NO: 31 and a VL sequence that is SEQ ID NO: 32.

[0272] The antibody designated 2A9 comprises a VH sequence that is SEQ ID NO: 33 and a VL sequence that is SEQ ID NO: 34.

[0273] The antibody designated 24G2 comprises a VH sequence that is SEQ ID NO: 35 and a VL sequence that is SEQ ID NO: 36.

[0274] The antibody designated 6G9 comprises a VH sequence that is SEQ ID NO: 37 and a VL sequence that is SEQ ID NO: 38.

[0275] The antibody designated 2B11 comprises a VH sequence that is SEQ ID NO: 39 and a VL sequence that is SEQ ID NO: 40.

[0276] The antibody designated 1A3 comprises a VH sequence that is SEQ ID NO: 480 and a VL sequence that is SEQ ID NO: 481.

[0277] The antibody designated P1B6 comprises a VH sequence that is SEQ ID NO: 482 and a VL sequence that is SEQ ID NO: 483.

[0278] The antibody designated P1H8 comprises a VH sequence that is SEQ ID NO: 484 and a VL sequence that is SEQ ID NO: 485.

[0279] The antibody designated P8G4 comprises a VH sequence that is SEQ ID NO: 486 and a VL sequence that is SEQ ID NO: 487.

TABLE 1
Antibody 1C1 CDR Sequences

| | | Exemplary | IMGT | Kabat | Chothia | Contact | AbM |
|---|---|---|---|---|---|---|---|
| VH CDR | VH | GFSLNDYGVH | GFSLNDYG | DYGVH | GFSLNDY | NDYGVH | GFSLNDYGVH |
| Seq. | CDR1 | (SEQ ID NO: | (SEQ ID NO: | (SEQ ID NO: | (SEQ ID NO: | (SEQ ID NO: | (SEQ ID NO: |
| | | 41) | 42) | 43) | 44) | 45) | 41) |
| | VH | VIWSGGRTDYN | IWSGGRT | VIWSGGRTDYN | ISGG | WLGVIWSGGRT | VIWSGGRTD |
| | CDR2 | AAFIS | (SEQ ID NO: | AAFIS | (SEQ ID NO: | D | (SEQ ID NO: |
| | | (SEQ ID NO: | 133) | (SEQ ID NO: | 134) | (SEQ ID NO: | 136) |
| | | 132) | | 132) | | 135) | |
| | VH | WALYFLYGGSM | ARWALYFLYGG | WALYFLYGGSM | ALYFLYGGSMD | ARWALYFLYGG | WALYFLYGGSM |
| | CDR3 | DY | SMDY | DY | (SEQ ID NO: | SMD | DY |
| | | (SEQ ID NO: | (SEQ ID NO: | (SEQ ID NO: | 223) | (SEQ ID NO: | (SEQ ID NO: |
| | | 221) | 222) | 221) | | 224) | 221) |
| VL CDR | VL | RSSQSLVHSSGI | QSLVHSSGITY | RSSQSLVHSSGI | SQSLVHSSGITY | VHSSGITYLHWY | RSSQSLVHSSGI |
| Seq. | CDR1 | TYLH | (SEQ ID NO: | TYLH (SEQ ID | (SEQ ID NO: | (SEQ ID NO: | TYLH |
| | | (SEQ ID NO: | 298) | NO: 297) | 299) | 300) | (SEQ ID NO: |
| | | 297) | | | | | 297) |
| | VL | KLSNRFS | KLS | KLSNRFS | KLS | LLIYKLSNRF | KLSNRFS |
| | CDR2 | (SEQ ID NO: | (SEQ ID NO: | (SEQ ID NO: | (SEQ ID NO: | (SEQ ID NO: | (SEQ ID NO: |
| | | 373) | 374) | 373) | 374) | 375) | 373) |
| | VL | SQSTHVPPWT | SQSTHVPPWT | SQSTHVPPWT | STHVPPW | SQSTHVPPW | SQSTHVPPWT |
| | CDR3 | (SEQ ID NO: | (SEQ ID NO: | (SEQ ID NO: | (SEQ ID NO: | (SEQ ID NO: | (SEQ ID NO: |
| | | 423) | 423) | 423) | 424) | 425) | 423) |

VH Sequence:
QMQLKQSGPGLVQPSQSLSITCTVSGFSLNDYGVHWIRQSPGKGLEWLGVIWSGGRTDYNAAFISRLSISKDNSKSQVFFKMSSLQ
PQDTAIYYCARWALYFLYGGSMDYWGQGTSVTVSS (SEQ ID NO: 1)
VL Sequence:
DVVLTQTPLSLPVSPGDQASISCRSSQSLVHSSGITYLHWYLQKPGQSPKLLIYKLSNRFSGVPDRFSGSGSGTDFTLKISRVEAEDL
GVYFCSQSTHVPPWTFGGGTKLEIK (SEQ ID NO: 2)

TABLE 2
Antibody 3P10 CDR Sequences

| | | Exemplary | IMGT | Kabat | Chothia | Contact | AbM |
|---|---|---|---|---|---|---|---|
| VH CDR | VH | GYTFTDYGVI | GYTFTDYG | DYGVI | GYTFTDY | TDYGVI | GYTFTDYGVI |
| Seq. | CDR1 | (SEQ ID | (SEQ ID NO: | (SEQ ID | (SEQ ID NO: | (SEQ ID NO: | (SEQ ID |
| | | NO: 46) | 47) | NO: 48) | 49) | 50) | NO: 46) |
| | VH | WINTYTGEPTYAD | INTYTGEP | WINTYTGEPTYAD | TYTG | WMGWINTYTGEP | WINTYTGEPT |
| | CDR2 | DLKG (SEQ ID | (SEQ ID NO: | DLKG (SEQ ID | (SEQ ID NO: | T (SEQ ID NO: | (SEQ ID NO: |
| | | NO: 137) | 138) | NO: 137) | 139) | 140) | 141) |
| | VH | RYGPEDIDY | ARRYGPEDIDY | RYGPEDIDY | YGPEDID | ARRYGPEDID | RYGPEDIDY |
| | CDR3 | (SEQ ID NO: | (SEQ ID NO: | (SEQ ID NO: | (SEQ ID NO: | (SEQ ID NO: | (SEQ ID NO: |
| | | 225) | 226) | 225) | 227) | 228) | 225) |
| VL CDR | VL | RASESVDNYGISF | ESVDNYGISF | RASESVDNYGISF | SESVDNYGISF | DNYGISFMSWF | RASESVDNYGISF |
| Seq. | CDR1 | MS | (SEQ ID | MS | (SEQ ID NO: | (SEQ ID NO: | MS |
| | | (SEQ ID NO: | NO: 302) | (SEQ ID NO: | 303) | 304) | (SEQ ID NO: |
| | | 301) | | 301) | | | 301) |
| | VL | AASHQGS | AAS | AASHQGS | AAS | LLIYAASHQG | AASHQGS |
| | CDR2 | (SEQ ID NO: | (SEQ ID NO: | (SEQ ID NO: | (SEQ ID NO: | (SEQ ID NO: | (SEQ ID NO: |
| | | 376) | 377) | 376) | 377) | 378) | 376) |
| | VL | LQSKEVPWT | LQSKEVPWT | LQSKEVPWT | SKEVPW | LQSKEVPW | LQSKEVPWT |
| | CDR3 | (SEQ ID NO: | (SEQ ID NO: | (SEQ ID NO: | (SEQ ID NO: | (SEQ ID NO: | (SEQ ID NO: |
| | | 426) | 426) | 426) | 427) | 428) | 426) |

VH Sequence:
QIQLVQSGPELKKPGETVKISCKASGYTFTDYGVIWVKQAPGKALKWMGWINTYTGEPTYADDLKGRFAFSLETSASSASLQINNLKNEDTATYFC
ARRYGPEDIDYWGQGTTLTVSS (SEQ ID NO: 3)
VL Sequence:
DIVLTQSPVSLAVSLGQRATISCRASESVDNYGISFMSWFQQKPGQPPKLLIYAASHQGSGVPARFSGSGSGTDFSLNIHPMEEDDSAMYFCLQS
KEVPWTFGGGTKLEIK (SEQ ID NO: 4)

TABLE 3
Antibody 12A3 CDR Sequences

| | | Exemplary | IMGT | Kabat | Chothia | Contact | AbM |
|---|---|---|---|---|---|---|---|
| VH CDR | VH | GYPFTIYGMN | GYPFTIYG | IYGMN | GYPFTIY | TIYGMN | GYPFTIYGMN |
| Seq. | CDR1 | (SEQ ID NO: | (SEQ ID | (SEQ ID NO: | (SEQ ID NO: | (SEQ ID NO: | (SEQ ID NO: |
| | | 51) | NO: 52) | 53) | 54) | 55) | 51) |
| | VH | WINTYSGVPTY | INTYSGVP | WINTYSGVPTY | TYSG | WMGWINTYSG | WINTYSGVPT |
| | CDR2 | ADDFKG | (SEQ ID | ADDFKG | (SEQ ID NO: | VPT | (SEQ ID NO: |
| | | (SEQ ID NO: | NO: 143) | (SEQ ID NO: | 144) | (SEQ ID NO: | 146) |
| | | 142) | | 142) | | 145) | |
| | VH | ATGNY | ASATGNY | ATGNY | TGN | ASATGN | ATGNY |
| | CDR3 | (SEQ ID NO: | (SEQ ID | (SEQ ID NO: | (SEQ ID NO: | (SEQ ID NO: | (SEQ ID NO: |
| | | 229) | NO: 230) | 229) | 231) | 232) | 229) |
| VL CDR | VL | RASQDIGSSLN | QDIGSS | RASQDIGSSLN | SQDIGSS | GSSLNWL | RASQDIGSSLN |
| Seq. | CDR1 | (SEQ ID NO: | (SEQ ID | (SEQ ID NO: | (SEQ ID NO: | (SEQ ID NO: | SEQ ID NO: |
| | | 305) | NO: 306) | 305) | 307) | 308) | 305) |
| | VL | ATSSLDS | ATS | ATSSLDS | ATS | RLIYATSSLD | ATSSLDS |
| | CDR2 | (SEQ ID NO: | (SEQ ID | (SEQ ID NO: | (SEQ ID NO: | (SEQ ID NO: | (SEQ ID NO: |
| | | 379) | NO: 380) | 379) | 380) | 381) | 379) |
| | VL | LQYASSPYT | LQYASSPYT | LQYASSPYT | YASSPY | LQYASSPY | LQYASSPYT |
| | CDR3 | (SEQ ID NO: | (SEQ ID | (SEQ ID NO: | (SEQ ID NO: | (SEQ ID NO: | (SEQ ID NO: |
| | | 429) | NO: 429) | (429) | 430) | 431) | 429) |

VH Sequence:
QIQLVQSGPELKKPGETVKISCKASGYPFTIYGMNWVEQAPGKGLKWMGWINTYSGVPTYADDFKGRFAFSLETSASTA
YLQINNLKDEDTATYFCASATGNYWGQGTTLTVSS (SEQ ID NO: 5)
VL Sequence:
DIQMTQSPSSLSASLGERVSLTCRASQDIGSSLNWLQQEPDGTIKRLIYATSSLDSGVPKRFSGSRSGSDYSLTISSLESE
DFVDYYCLQYASSPYTFGGGTKVEIK (SEQ ID NO: 6)

TABLE 4
Antibody 5F12 CDR Sequences

| | | Exemplary | IMGT | Kabat | Chothia | Contact | AbM |
|---|---|---|---|---|---|---|---|
| VH CDR | VH | GYTFTDYYIN | GYTFTDYY | DYYIN | GYTFTDY | TDYYIN | GYTFTDYYIN |
| Seq. | CDR1 | (SEQ ID NO: | (SEQ ID NO: | (SEQ ID NO: | (SEQ ID NO: | (SEQ ID NO: | (SEQ ID NO: |
| | | 56) | 57) | 58) | 49) | 59) | 56) |
| | VH | RIYPGNGNTYH | IYPGNGNT | RIYPGNGNTYH | PGNG | WIARIYPGNGN | RIYPGNGNTY |
| | CDR2 | NEKFKG | (SEQ ID NO: | NEKFKG | (SEQ ID NO: | TY | (SEQ ID NO: |
| | | (SEQ ID NO: | 148) | (SEQ ID NO: | 149) | (SEQ ID NO: | 151) |
| | | 147) | | 147) | | 150) | |
| | VH | EGLYYDYDRY | AREGLYYDYD | EGLYYDYDRY | GLYYDYDRYF | AREGLYYDYD | EGLYYDYDRY |
| | CDR3 | FDY | RYFDY | FDY | D | RYFD | FDY |
| | | (SEQ ID NO: | (SEQ ID NO: | (SEQ ID NO: | (SEQ ID NO: | (SEQ ID NO: | (SEQ ID NO: |
| | | 233) | 234) | 233) | 235) | 236) | 233) |
| VL CDR | VL | RASESVDTYG | ESVDTYGNSF | RASESVDTYG | SESVDTYGNS | DTYGNSFMHW | RASESVDTYG |
| Seq. | CDR1 | NSFMH | (SEQ ID NO: | NSFMH | F | Y | NSFMH |
| | | SEQ ID NO: | 310) | (SEQ ID NO: | (SEQ ID NO: | (SEQ ID NO: | (SEQ ID NO: |
| | | 309) | | 309) | 311) | 312) | 309) |
| | VL | LASNLES | LAS | LASNLES | LAS | LLIYLASNLE | LASNLES |
| | CDR2 | SEQ ID NO: | (SEQ ID NO: | (SEQ ID NO: | (SEQ ID NO: | (SEQ ID NO: | (SEQ ID NO: |
| | | 382) | 383) | 382) | 383) | 384) | 382) |
| | VL | HQNNEDPPA | HQNNEDPPA | HQNNEDPPA | NNEDPP | HQNNEDPP | HQNNEDPPA |
| | CDR3 | (SEQ ID NO: | (SEQ ID NO: | (SEQ ID NO: | (SEQ ID NO: | (SEQ ID NO: | (SEQ ID NO: |
| | | 432) | 432) | 432) | 433) | 434) | 432) |

VH Sequence:
QVQLKQSGTELVRPGASVKLSCKASGYTFTDYYINWVKQRPGQGLEWIARIYPGNGNTYHNEKFKGKATLTAEKSSSTA
YMQLSSLTSEDSAVYFCAREGLYYDYDRYFDYWGQGTALTVSS (SEQ ID NO: 7)
VL Sequence:
NIVLTQSPASLAVSLGQRATISCRASESVDTYGNSFMHWYQQKPGQPPKLLIYLASNLESGVPARFSGSGSRTDFTLTID
PVEADDAATYYCHQNNEDPPAFGGGTKLEIK (SEQ ID NO: 8)

TABLE 5
Antibody 5A20 CDR Sequences

| | | Exemplary | IMGT | Kabat | Chothia | Contact | AbM |
|---|---|---|---|---|---|---|---|
| VH CDR | VH | GYTFTDYWIE | GYTFTDYW | DYWIE | GYTFTDY | TDYWIE | GYTFTDYWIE |
| Seq. | CDR1 | (SEQ ID NO: | SEQ ID NO: | (SEQ ID NO: | (SEQ ID NO: | (SEQ ID NO: | (SEQ ID NO: |
| | | 60) | 61) | 62) | 49) | (63) | 60) |
| | VH | EILLGSDSIHFN | ILLGSDSI | EILLGSDSIHFN | LGSD | WIGEILLGSDSI | EILLGSDSIH |
| | CDR2 | EKFKG | SEQ ID NO: | EKFKG | (SEQ ID NO: | H | (SEQ ID NO: |
| | | (SEQ ID NO: | 153) | (SEQ ID NO: | 154) | (SEQ ID NO: | 156) |
| | | 152) | | 152) | | 155) | |
| | VH | QDWNWYFDV | VRQDWNWYF | QDWNWYFDV | DWNWYFD | VRQDWNWYF | QDWNWYFDV |
| | CDR3 | (SEQ ID NO: | DV | (SEQ ID NO: | (SEQ ID NO: | D | (SEQ ID NO: |
| | | 237) | (SEQ ID NO: | 237) | 239) | (SEQ ID NO: | 237) |
| | | | 238) | | | (240) | |
| VL CDR | VL | KSSQSLLDFDG | QSLLDFDGKTY | KSSQSLLDFDG | SQSLLDFDGKT | LDFDGKTYLN | KSSQSLLDFDG |
| Seq. | CDR1 | KTYLN | (SEQ ID NO: | KTYLN | Y | WY | KTYLN |
| | | (SEQ ID NO: | 314) | (SEQ ID NO: | (SEQ ID NO: | (SEQ ID NO: | (SEQ ID NO: |
| | | 313) | | 313) | 315) | 316) | 313) |
| | VL | LVSKLDS | LVS | LVSKLDS | LVS | RLFYLVSKLD | LVSKLDS |
| | CDR2 | (SEQ ID NO: | (SEQ ID NO: | (SEQ ID NO: | (SEQ ID NO: | (SEQ ID NO: | (SEQ ID NO: |
| | | 385) | 386) | 385) | 386) | 387) | 385) |
| | VL | WQGTHFPRT | WQGTHFPRT | WQGTHFPRT | IGTHFPR | WQGTHFPR | WQGTHFPRT |
| | CDR3 | (SEQ ID NO: | (SEQ ID NO: | (SEQ ID NO: | (SEQ ID NO: | (SEQ ID NO: | (SEQ ID NO: |
| | | 435) | 435) | 435) | 436) | 437) | 435) |

VH Sequence:
QVQLQQSGPELMKPGASVILSCKAIGYTFTDYWIEWVKERPGHGLEWIGEILLGSDSIHFNEKFKGKATISADTSSNTAYM
QLSSLTTEDSAIYYCVRQDWNWYFDVWGTGTTVTVSS (SEQ ID NO: 9)
VL Sequence:
DVVMTQTPLTLSVTIGHPASISCKSSQSLLDFDGKTYLNWLFQRPGQSPKRLFYLVSKLDSGVPDRFTGSGSGTDFTLKIS
RVEAEDLGVYYCWQGTHFPRTFGGGTKLEIK (SEQ ID NO: 10)

TABLE 6
Antibody 8D8 CDR Sequences

| | | Exemplary | IMGT | Kabat | Chothia | Contact | AbM |
|---|---|---|---|---|---|---|---|
| VH CDR | VH | GFSLSRYSVH | GFSLSRYS | RYSVH | GFSLSRY | SRYSVH | GFSLSRYSVH |
| Seq. | CDR1 | (SEQ ID NO: | (SEQ ID NO: | (SEQ ID NO: | SEQ ID NO: | (SEQ ID NO: | (SEQ ID NO: |
| | | 64) | 65) | 66) | 67) | 68) | 64) |
| | VH | MIWGFGSTDY | IWGFGST | MIWGFGSTDY | GFG | WLGMIWGFGS | MIWGFGSTD |
| | CDR2 | NSALKS | SEQ ID NO: | NSALKS | (SEQ ID NO: | TD | (SEQ ID NO: |
| | | (SEQ ID NO: | 220) | (SEQ ID NO: | 158) | (SEQ ID NO: | 160) |
| | | 157) | | 157) | | 159) | |
| | VH | IHTTAGSY | ARIHTTAGSY | IHTTAGSY | HTTAGS | ARIHTTAGS | IHTTAGSY |
| | CDR3 | (SEQ ID NO: | (SEQ ID NO: | (SEQ ID NO: | (SEQ ID NO: | (SEQ ID NO: | (SEQ ID NO: |
| | | 241) | 242) | 241) | 243) | 244) | 241) |
| VL CDR | VL | KASQNVGTNV | QNVGTN | KASQNVGTNV | SQNVGTN | GTNVAWY | KASQNVGTNV |
| Seq. | CDR1 | A (SEQ ID | SEQ ID NO: | A | SEQ ID NO: | (SEQ ID NO: | A |
| | | NO: 317) | 318) | (SEQ ID NO: | 319) | 320) | (SEQ ID NO: |
| | | | | 317) | | | 317) |
| | VL | STSYRYS | STS | STSYRYS | STS | ALVYSTSYRY | STSYRYS |
| | CDR2 | (SEQ ID NO: | SEQ ID NO: | (SEQ ID NO: | (SEQ ID NO: | (SEQ ID NO: | (SEQ ID NO: |
| | | 388) | 389) | 388) | 389) | 390) | 388) |
| | VL | HQYNSYPLT | HQYNSYPLT | HQYNSYPLT | YNSYPL | HQYNSYPL | HQYNSYPLT |
| | CDR3 | (SEQ ID NO: | (SEQ ID NO: | (SEQ ID NO: | (SEQ ID NO: | (SEQ ID NO: | (SEQ ID NO: |
| | | 438) | 438) | 438) | 439) | 440) | 438) |

VH Sequence:
QVQLKESGPGLVAPSQSLSITCTVSGFSLSRYSVHWVRQPPGKGLEWLGMIWGFGSTDYNSALKSRLSITKDNSKSQFF
LKMNSLQTDDTAMYYCARIHTTAGSYWGQGTLVTVSA (SEQ ID NO: 11)
VL Sequence:
DIVMTQSQKFMSTSIGDRVSVTCKASQNVGTNVAWYQQKPGQSPKALVYSTSYRYSGVPDRFTGSGSGTDFTLTISNVQ
SEDLAEYFCHQYNSYPLTFGAGTKLELK (SEQ ID NO: 12)

TABLE 7
Antibody 17J16 CDR Sequences

| | | Exemplary | IMGT | Kabat | Chothia | Contact | AbM |
|---|---|---|---|---|---|---|---|
| VH CDR | VH | GYTFTDYWIH | GYTFTDYW | DYWIH | GYTFTDY | TDYWIH | GYTFTDYWIH |
| Seq. | CDR1 | (SEQ ID NO: | (SEQ ID NO: | (SEQ ID NO: | (SEQ ID NO: | (SEQ ID NO: | (SEQ ID NO: |
| | | 69) | 61) | 70) | 49) | 71) | 69) |
| | VH | YINPNSNYAEY | INPNSNYA | YINPNSNYAEY | PNSN | WIGYINPNSNY | YINPNSNYAE |
| | CDR2 | NQKFKV | (SEQ ID NO: | NQKFKV | (SEQ ID NO: | AE | (SEQ ID NO: |
| | | (SEQ ID NO: | 162) | SEQ ID NO: | 163) | (SEQ ID NO: | 165) |
| | | 161) | | 161) | | 164) | |
| | VH | FDWNWYFHV | ARFDWNWYFH | FDWNWYFHV | DWNWYFH | ARFDWNWYFH | FDWNWYFHV |
| | CDR3 | (SEQ ID NO: | V | (SEQ ID NO: | (SEQ ID NO: | (SEQ ID NO: | (SEQ ID NO: |
| | | (245) | (SEQ ID NO: | 245) | 247) | 248) | 245) |
| | | | 246) | | | | |
| VL CDR | VL | KSSQSLSDSD | QSLSDSDGKT | KSSQSLSDSD | SQSLSDSDGK | SDSDGKTYLN | KSSQSLSDSD |
| Seq. | CDR1 | GKTYLN | Y | GKTYLN | TY | WL | GKTYLN |
| | | (SEQ ID NO: | (SEQ ID NO: | (SEQ ID NO: | (SEQ ID NO: | (SEQ ID NO: | (SEQ ID NO: |
| | | 321) | 322) | 321) | 323) | 324) | 321) |
| | VL | LVSRLGS | LVS | LVSRLGS | LVS | RLIYLVSRLG | LVSRLGS |
| | CDR2 | (SEQ ID NO: | (SEQ ID NO: | (SEQ ID NO: | (SEQ ID NO: | (SEQ ID NO: | (SEQ ID NO: |
| | | 391) | 386) | 391) | 386) | 392) | 391) |
| | VL | WQGTHFPQT | WQGTHFPQT | WQGTHFPQT | GTHFPQ | WQGTHFPQ | WQGTHFPQT |
| | CDR3 | (SEQ ID NO: | (SEQ ID NO: | (SEQ ID NO: | (SEQ ID NO: | (SEQ ID NO: | (SEQ ID NO: |
| | | 441) | 441) | 441) | 442) | 443) | 441) |

VH Sequence:
QVQLQQSGAELAKPGASVKMSCKTSGYTFTDYWIHWVKQRPGQGLEWIGYINPNSNYAEYNQKFKVKATLTADKSSST
AYLQLSRLTSEDSAVYYCARFDWNWYFHVWGAGSTVTVSS (SEQ ID NO: 13)
VL Sequence:
DVALTQIPLTLSVTVGQPASISCKSSQSLSDSDGKTYLNWLLQKPGQSPKRLIYLVSRLGSGVPDRFTGSGSGADFTLKIS
RVEAEDLGVYYCWQGTHFPQTFGGGTKLEIK (SEQ ID NO: 14)

TABLE 8
Antibody 25M22 CDR Sequences

| | | Exemplary | IMGT | Kabat | Chothia | Contact | AbM |
|---|---|---|---|---|---|---|---|
| VH CDR | VH | GYTFTSYWVN | GYTFTSYW | SYWVN | GYTFTSY | TSYWVN | GYTFTSYWVN |
| Seq. | CDR1 | (SEQ ID NO: | (SEQ ID NO: | (SEQ ID NO: | (SEQ ID NO: | (SEQ ID NO: | (SEQ ID NO: |
| | | 72) | 73) | 74) | 75) | 76) | 72) |
| | VH | RIYPGDGDTNY | IYPGDGDT | RIYPGDGDTNY | PGDG | WIGRIYPGDGD | RIYPGDGDTN |
| | CDR2 | NGKFKG | (SEQ ID NO: | NGKFKG | (SEQ ID NO: | TN | (SEQ ID NO: |
| | | (SEQ ID NO: | 167) | (SEQ ID NO: | 168) | (SEQ ID NO: | 170) |
| | | 166) | | 166) | | 169) | |
| | VH | AYLLRLRRTGY | ARAYLLRLRRT | AYLLRLRRTGY | YLLRLRRTGYY | ARAYLLRLRRT | AYLLRLRRTGY |
| | CDR3 | YAMDY | GYYAMDY | YAMDY | AMD | GYYAMD | YAMDY |
| | | (SEQ ID NO: | (SEQ ID NO: | (SEQ ID NO: | (SEQ ID NO: | (SEQ ID NO: | (SEQ ID NO: |
| | | 249) | 250) | 249) | 251) | 252) | 249) |
| VL CDR | VL | KSTKSLLNSDE | KSLLNSDEFTY | KSTKSLLNSDE | TKSLLNSDEFT | LNSDEFTYLD | KSTKSLLNSDE |
| Seq. | CDR1 | FTYLD | (SEQ ID NO: | FTYLD | Y | WY | FTYLD |
| | | (SEQ ID NO: | 326) | (SEQ ID NO: | (SEQ ID NO: | (SEQ ID NO: | (SEQ ID NO: |
| | | 325) | | 325) | 327) | 328) | 325) |
| | VL | LVSNRFS | LVS | LVSNRFS | LVS | LLIFLVSNRF | LVSNRFS |
| | CDR2 | (SEQ ID NO: | (SEQ ID NO: | (SEQ ID NO: | (SEQ ID NO: | (SEQ ID NO: | (SEQ ID NO: |
| | | 393) | 386) | 393) | 386) | 394) | 393) |
| | VL | FQSNYLPYT | FQSNYLPYT | FQSNYLPYT | SNYLPY | FQSNYLPY | FQSNYLPYT |
| | CDR3 | (SEQ ID NO: | (SEQ ID NO: | (SEQ ID NO: | (SEQ ID NO: | (SEQ ID NO: | (SEQ ID NO: |
| | | 444) | 444) | 444) | 445) | 446) | 444) |

VH Sequence:
QVQLQQSGPDLVKPGASVKISCKASGYTFTSYWVNWMKQRPGKGLEWIGRIYPGDGDTNYNGKFKGKATLTADKSSST
AYMQLSSLTSEDSAVYFCARAYLLRLRRTGYYAMDYWGQGTSVTVSS (SEQ ID NO: 15)
VL Sequence:
DVVLTQTPLSLPVNIGDQASISCKSTKSLLNSDEFTYLDWYLQKPGQSPQLLIFLVSNRFSGVPDRFSGSGSGTDFTLKIS
RVEAEDLGVYYCFQSNYLPYTFGGGTKLEIK (SEQ ID NO: 16)

TABLE 9
Antibody 2B8 CDR Sequences

| | | Exemplary | IMGT | Kabat | Chothia | Contact | AbM |
|---|---|---|---|---|---|---|---|
| VH CDR | VH | GYTFTTYGMS | GYTFTTYG | TYGMS | GYTFTTY | TTYGMS | GYTFTTYGMS |
| Seq. | CDR1 | (SEQ ID NO: | (SEQ ID NO: | (SEQ ID NO: | (SEQ ID NO: | (SEQ ID NO: | (SEQ ID NO: |
| | | (77) | 78 | 79) | 80) | 81) | 77 |
| | VH | WINTYSGVPTF | INTYSGVP | WINTYSGVPTF | TYSG | WMGWINTYSG | WINTYSGVPT |
| | CDR2 | VDDFRG | (SEQ ID NO: | VDDFRG (SEQ | (SEQ ID NO: | VPT (SEQ ID | SEQ ID NO: |
| | | (SEQ ID NO: | 143) | ID NO: 171) | 144) | NO: 145) | 146) |
| | | 171) | | | | | |
| | VH | RSSYYPYWYF | ARRSSYYPYW | RSSYYPYWYF | SSYYPYWYFD | ARRSSYYPYW | RSSYYPYWYF |
| | CDR3 | DV | YFDV | DV | (SEQ ID NO: | YFD | DV |
| | | (SEQ ID NO: | (SEQ ID NO: | (SEQ ID NO: | 255) | (SEQ ID NO: | (SEQ ID NO: |
| | | 253) | 254) | 253) | | 256) | 253) |
| VL CDR | VL | RPSENIYSYLT | ENIYSY | RPSENIYSYLT | SENIYSY | YSYLTWF | RPSENIYSYLT |
| Seq. | CDR1 | (SEQ ID NO: | (SEQ ID NO: | (SEQ ID NO: | (SEQ ID NO: | (SEQ ID NO: | (SEQ ID NO: |
| | | 329) | 330) | 329) | 331) | 332) | 329) |
| | VL | NAQTLAE | NAQ | NAQTLAE | NAQ | LLVYNAQTLA | NAQTLAE |
| | CDR2 | (SEQ ID NO: | (SEQ ID NO: | (SEQ ID NO: | (SEQ ID NO: | (SEQ ID NO: | (SEQ ID NO: |
| | | 395) | 396) | 395) | 396) | 397) | 395) |
| | VL | QHYYGYPFT | QHYYGYPFT | QHYYGYPFT | YYGYPF | QHYYGYPF | QHYYGYPFT |
| | CDR3 | (SEQ ID NO: | (SEQ ID NO: | (SEQ ID NO: | (SEQ ID NO: | (SEQ ID NO: | (SEQ ID NO: |
| | | 447) | 447) | 447) | 448) | 449) | 447) |

VH Sequence:
QIQLVQSGPELKKPGETVKISCKASGYTFTTYGMSWVKQAPGKIFKWMGWINTYSGVPTFVDDFRGRFAFSLETSASTA
YLQIGNLKNEDTATYFCARRSSYYPYWYFDVWGTGTTVTVSS (SEQ ID NO: 17)
VL Sequence:
DIQMTQSPASLSASVGETVTITCRPSENIYSYLTWFQQEQGKSPQLLVYNAQTLAEGVPSRFSGSGSGTHFSLKINSLQP
EDFGTYYCQHYYGYPFTFGSGTKLEIK (SEQ ID NO: 18)

TABLE 10
Antibody 22N5 CDR Sequences

| | | Exemplary | IMGT | Kabat | Chothia | Contact | AbM |
|---|---|---|---|---|---|---|---|
| VH CDR | VH | GYTFTDYSMH | GYTFTDYS | DYSMH | GYTFTDY | TDYSMH | GYTFTDYSMH |
| Seq. | CDR1 | (SEQ ID NO: | (SEQ ID | (SEQ ID NO: | (SEQ ID | (SEQ ID | (SEQ ID NO: |
| | | (82) | NO: 83 | 84) | NO: 49) | NO: 85) | 82) |
| | VH | WINTETGEPTY | INTETGEP | WINTETGEPTY | TETG | WMGWINTETG | WINTETGEPT |
| | CDR2 | ADDFKG (SEQ | (SEQ ID | ADDFKG | SEQ ID | EPT | (SEQ ID NO: |
| | | ID NO: 172) | NO: 173) | (SEQ ID | NO: 174) | (SEQ ID | 176) |
| | | | | NO: 172) | | NO: 175) | |
| | VH | GTLNY | VKGTLNY | GTLNY | TLN | VKGTLN | GTLNY |
| | CDR3 | (SEQ ID NO: | (SEQ ID | (SEQ ID | (SEQ ID | (SEQ ID | (SEQ ID NO: |
| | | 257) | NO: 258) | NO: 257) | NO: 259) | NO: 260) | 257) |
| VL CDR | VL | KASQDIKSYLN | QDIKSY | KASQDIKSYLN | SQDIKSY | KSYLNWF | KASQDIKSYLN |
| Seq. | CDR1 | (SEQ ID NO: | (SEQ ID | (SEQ ID NO: | (SEQ ID | (SEQ ID | (SEQ ID NO: |
| | | 333) | NO: 334) | 333) | NO: 335) | NO: 336) | 333) |
| | VL | RTKRLVD | RTK | RTKRLVD | RTK | TLIYRTKRLV | RTKRLVD |
| | CDR2 | (SEQ ID NO: | (SEQ ID | (SEQ ID | (SEQ ID | (SEQ ID | (SEQ ID NO: |
| | | 398) | NO:399) | NO: 398) | NO: 399) | NO: 400) | 398) |
| | VL | LQYVEFPLT | LQYVEFPLT | LQYVEFPLT | YVEFPL | LQYVEFPL | LQYVEFPLT |
| | CDR3 | (SEQ ID NO: | (SEQ ID | (SEQ ID | (SEQ ID | (SEQ ID | (SEQ ID NO: |
| | | 450) | NO: 450) | NO: 450) | NO: 451) | NO: 452) | 450) |

VH Sequence:
QNQLVQSGPELKKPGEIVKISCKTSGYTFTDYSMHWVKKTPGKGFKWMGWINTETGEPTYADDFKGRFAFSLETSANT
AHLQITNLKNEDTATYFCVKGTLNYWGQGTTLTVSS (SEQ ID NO: 19)
VL Sequence:
DIKMTQSPSSMYASLGERVTITCKASQDIKSYLNWFQQKPGKSPKTLIYRTKRLVDGVPSRFSGSGSGQDYSLTVSSLEY
DDVGIYYCLQYVEFPLTFGDGTKLELK (SEQ ID NO: 20)

TABLE 11
Antibody 2123 CDR Sequences

| | | Exemplary | IMGT | Kabat | Chothia | Contact | AbM |
|---|---|---|---|---|---|---|---|
| VH CDR | VH | GYSFTSYNID | GYSFTSYN | SYNID | GYSFTSY | TSYNID | GYSFTSYNID |
| Seq. | CDR1 | (SEQ ID NO: | (SEQ ID NO: | (SEQ ID NO: | (SEQ ID NO: | (SEQ ID NO: | (SEQ ID NO: |
| | | 86) | 87) | 88 | 89) | 90) | 86) |
| | VH | WIFPGDGST | IFPGDGST | WIFPGDGSTK | PGDG | WIGWIFPGDG | WIFPGDGSTK |
| | CDR2 | (SEQ ID NO: | (SEQ ID NO: | YNEKFKG | (SEQ ID NO: | STK | (SEQ ID NO: |
| | | 177) | 178) | (SEQ ID NO: | 168) | (SEQ ID NO: | 181) |
| | | | | 179) | | 180) | |
| | VH | SGIYYGSHFVY | ARSGIYYGSHF | SGIYYGSHFVY | GIYYGSHFV | ARSGIYYGSHF | SGIYYGSHFVY |
| | CDR3 | (SEQ ID NO: | VY | (SEQ ID NO: | (SEQ ID NO: | V | (SEQ ID NO: |
| | | 261) | (SEQ ID NO: | 261) | 263) | SEQ ID NO: | 261) |
| | | | 262) | | | 264) | |
| VL CDR | VL | RSSQSLLDSD | QSLLDSDGKT | RSSQSLLDSD | SQSLLDSDGK | LDSDGKTYLN | RSSQSLLDSD |
| Seq. | CDR1 | GKTYLN | Y (SEQ ID | GKTYLN (SEQ | TY | WL | GKTYLN |
| | | (SEQ ID NO: | NO: 338) | ID NO: 337) | (SEQ ID NO: | SEQ ID NO: | (SEQ ID NO: |
| | | 337) | | | 339) | 340) | 337) |
| | VL | LVSKVDS | LVS | LVSKVDS | LVS | RLIYLVSKVD | LVSKVDS |
| | CDR2 | (SEQ ID NO: | (SEQ ID NO: | (SEQ ID NO: | (SEQ ID NO: | (SEQ ID NO: | (SEQ ID NO: |
| | | 401) | 386) | 401) | 386) | 402) | 401) |
| | VL | WQGTHFPLT | WQGTHFPLT | WQGTHFPLT | GTHFPL | WQGTHFPL | WQGTHFPLT |
| | CDR3 | (SEQ ID NO: | (SEQ ID NO: | (SEQ ID NO: | (SEQ ID NO: | (SEQ ID NO: | (SEQ ID NO: |
| | | 453) | 453) | 453) | 454) | 455) | 453) |

VH Sequence:
QAQLQQSGAELVKPGASVKLSCKASGYSFTSYNIDWVRQRPEQGLEWIGWIFPGDGSTKYNEKFKGQATLTTDKSSST
TYIHLSRLTSEDSAVYFCARSGIYYGSHFVYWGQGTLVTVSA (SEQ ID NO: 21)
VL Sequence:
DVVMTQTPLTLSVTIGQSASISCRSSQSLLDSDGKTYLNWLLQRPGQSPKRLIYLVSKVDSGVPDRFTGSGSGTDFTLKI
SRVEAEDLGVYFCWQGTHFPLTFGAGTKLELK (SEQ ID NO: 22)

TABLE 12
Antibody 6N16 CDR Sequences

| | | Exemplary | IMGT | Kabat | Chothia | Contact | AbM |
|---|---|---|---|---|---|---|---|
| VH CDR | VH | GYTFTSYNIN | GYTFTSYN | SYNIN | GYTFTSY | TSYNIN | GYTFTSYNIN |
| Seq. | CDR1 | (SEQ ID NO: | (SEQ ID NO: | (SEQ ID NO: | (SEQ ID NO: | (SEQ ID NO: | (SEQ ID NO: |
| | | 91) | 92) | 93) | 75) | 94) | 91) |
| | VH | WIFPGDDSIKY | IFPGDDSI | WIFPGDDSIKY | PGDD | WIGWIFPGDD | WIFPGDDSIK |
| | CDR2 | NENFRG (SEQ | (SEQ ID NO: | NENFRG | (SEQ ID NO: | SIK | (SEQ ID NO: |
| | | ID NO: 182) | 183) | (SEQ ID NO: | 184) | (SEQ ID NO: | 186) |
| | | | | 182) | | 185) | |
| | VH | SGIFYGNNFAY | ARSGIFYGNNF | SGIFYGNNFAY | GIFYGNNFA | ARSGIFYGNNF | SGIFYGNNFAY |
| | CDR3 | (SEQ ID NO: | AY | (SEQ ID NO: | (SEQ ID NO: | A | (SEQ ID NO: |
| | | 265) | (SEQ ID NO: | 265) | 267) | (SEQ ID NO: | 265) |
| | | | 266) | | | 268) | |
| VL CDR | VL | KSSQSLLDGD | QSLLDGDGET | KSSQSLLDGD | SQSLLDGDGE | LDGDGETYLS | KSSQSLLDGD |
| Seq. | CDR1 | GETYLS | Y | GETYLS | TY | WL | GETYLS |
| | | (SEQ ID NO: | (SEQ ID NO: | (SEQ ID NO: | (SEQ ID NO: | (SEQ ID NO: | (SEQ ID NO: |
| | | 341) | 342) | 341) | 343) | 344) | 341) |
| | VL | LVSKLDS | LVS | LVSKLDS | LVS | RLIYLVSKLD | LVSKLDS |
| | CDR2 | (SEQ ID NO: | (SEQ ID NO: | (SEQ ID NO: | (SEQ ID NO: | (SEQ ID NO: | (SEQ ID NO: |
| | | 385) | 386) | 385) | 386) | 403) | 385) |
| | VL | CQSTHFPLT | CQSTHFPLT | CQSTHFPLT | STHFPL | CQSTHFPL | CQSTHFPLT |
| | CDR3 | (SEQ ID NO: | (SEQ ID NO: | (SEQ ID NO: | (SEQ ID NO: | (SEQ ID NO: | (SEQ ID NO: |
| | | 456) | 456) | 456) | 457) | 458) | 456) |

VH Sequence:
QVQLQQSGSELVKPGTSMKLSCKASGYTFTSYNINWVRLRPEQGLEWIGWIFPGDDSIKYNENFRGKATLTTDKSSSTA
YMHLSRLTSDDSAVYFCARSGIFYGNNFAYWGQGTLVTVSA (SEQ ID NO: 23)
VL Sequence:
DVVMTQAPLILSVTIGQPASISCKSSQSLLDGDGETYLSWLLQRPGQSPKRLIYLVSKLDSGVPDRFTGSGSGTDFTLKIS
RVEAEDLGVYYCCQSTHFPLTFGAGTKLELK (SEQ ID NO: 24)

TABLE 13
Antibody 1B3 CDR Sequences

| | | Exemplary | IMGT | Kabat | Chothia | Contact | AbM |
|---|---|---|---|---|---|---|---|
| VH CDR | VH | GFTFTGYNIN | GFTFTGYN | GYNIN | GFTFTGY | TGYNIN | GFTFTGYNIN |
| Seq. | CDR1 | (SEQ ID NO: | (SEQ ID NO: | (SEQ ID NO: | (SEQ ID NO: | (SEQ ID NO: | (SEQ ID NO: |
| | | 95) | 96) | 97) | 98) | 99) | (95) |
| | VH | WIFPGDDNAK | IFPGDDNA | WIFPGDDNAK | PGDD | WIGWIFPGDD | WIFPGDDNAK |
| | CDR2 | YNEKFKG | (SEQ ID NO: | YNEKFKG | (SEQ ID NO: | NAK | (SEQ ID NO: |
| | | (SEQ ID NO: | 188) | (SEQ ID NO: | 184) | SEQ ID NO: | 190) |
| | | 187) | | 187) | | 189) | |
| | VH | TPVLSNYFDY | ARTPVLSNYFD | TPVLSNYFDY | PVLSNYFD | ARTPVLSNYFD | TPVLSNYFDY |
| | CDR3 | (SEQ ID NO: | Y (SEQ ID | (SEQ ID NO: | (SEQ ID NO: | (SEQ ID NO: | SEQ ID NO: |
| | | (269) | NO: 270) | 269) | 271) | 272) | 269) |
| VL CDR | VL | KASQDISKYIS | QDISKY | KASQDISKYIS | SQDISKY | SKYISWY | KASQDISKYIS |
| Seq. | CDR1 | (SEQ ID NO: | (SEQ ID NO: | (SEQ ID NO: | (SEQ ID NO: | (SEQ ID NO: | (SEQ ID NO: |
| | | 345) | 346) | 345) | 347) | 348) | 345) |
| | VL | YTSTLQP | YTS | YTSTLQP | YTS | LLIHYTSTLQ | YTSTLQP |
| | CDR2 | (SEQ ID NO: | (SEQ ID NO: | (SEQ ID NO: | (SEQ ID NO: | (SEQ ID NO: | (SEQ ID NO: |
| | | 404) | 405) | 404) | 405) | 406) | 404) |
| | VL | LQYDNLYT | LQYDNLYT | LQYDNLYT | YDNLY | LQYDNLY | LQYDNLYT |
| | CDR3 | (SEQ ID NO: | (SEQ ID NO: | (SEQ ID NO: | (SEQ ID NO: | (SEQ ID NO: | (SEQ ID NO: |
| | | 459) | (459) | 459) | 460) | 461) | 459) |

VH Sequence:
QVHLQQPGAELVKPGASVKLSCKASGFTFTGYNINWVRLRPEQGLEWIGWIFPGDDNAKYNEKFKGKATLTTDKSSNTA
YMQLSRLTSEDSAVYFCARTPVLSNYFDYWGQGTTLTVSS (SEQ ID NO: 25)
VL Sequence:
DIQMTQSPSSLSASLGGKVTITCKASQDISKYISWYQHKPGKSPRLLIHYTSTLQPGIPSRFSGSGSGRDYSFSISNLEPE
DIATYYCLQYDNLYTFGGGTKLEIK (SEQ ID NO: 26)

TABLE 14
Antibody 19K19 CDR Sequences

| | | Exemplary | IMGT | Kabat | Chothia | Contact | AbM |
|---|---|---|---|---|---|---|---|
| VH CDR | VH | GYAFTSYWMN | GYAFTSYW | SYWMN | GYAFTSY | TSYWMN | GYAFTSYWMN |
| Seq. | CDR1 | (SEQ ID NO: | (SEQ ID NO: | (SEQ ID NO: | (SEQ ID NO: | (SEQ ID NO: | (SEQ ID NO: |
| | | 100) | 101) | 102) | 103) | 104) | 100) |
| | VH | RIYPGDGDTNY | IYPGDGDT | RIYPGDGDTNY | PGDG | WIGRIYPGDGD | RIYPGDGDTN |
| | CDR2 | NGKFKG | (SEQ ID NO: | NGKFKG | (SEQ ID NO: | TN | (SEQ ID NO: |
| | | (SEQ ID NO: | 167) | (SEQ ID NO: | 168) | (SEQ ID NO: | 170) |
| | | 166) | | 166) | | 169) | |
| | VH | AYLLRLRRTGY | ARAYLLRLRRT | AYLLRLRRTGY | YLLRLRRTGYY | ARAYLLRLRRT | AYLLRLRRTGY |
| | CDR3 | YAMDY | GYYAMDY | YAMDY | AMD | GYYAMD | YAMDY |
| | | (SEQ ID NO: | (SEQ ID NO: | (SEQ ID NO: | (SEQ ID NO: | (SEQ ID NO: | (SEQ ID NO: |
| | | 249) | 250) | 249) | 251) | 252) | 249) |
| VL CDR | VL | KSTKSLLNSDE | KSLLNSDEFTY | KSTKSLLNSDE | TKSLLNSDEFT | LNSDEFTYLD | KSTKSLLNSDE |
| Seq. | CDR1 | FTYLD | (SEQ ID NO: | FTYLD | Y | WY | FTYLD |
| | | (SEQ ID NO: | 326) | (SEQ ID NO: | (SEQ ID NO: | (SEQ ID NO: | (SEQ ID NO: |
| | | 325) | | 325) | 327) | 328) | 325) |
| | VL | LVSNRFS | LVS | LVSNRFS | LVS | LLIYLVSNRF | LVSNRFS |
| | CDR2 | SEQ ID NO: | (SEQ ID NO: | (SEQ ID NO: | (SEQ ID NO: | (SEQ ID NO: | (SEQ ID NO: |
| | | 393) | 386) | 393) | 386) | 407) | 393) |
| | VL | FQSNYLPYT | FQSNYLPYT | FQSNYLPYT | SNYLPY | FQSNYLPY | FQSNYLPYT |
| | CDR3 | (SEQ ID NO: | (SEQ ID NO: | (SEQ ID NO: | (SEQ ID NO: | (SEQ ID NO: | (SEQ ID NO: |
| | | 444) | 444) | 444) | 445) | 446) | 444) |

VH Sequence:
QVQLQQSGPDLVKPGASVKISCKASGYAFTSYWMNWVKQRPGKGLEWIGRIYPGDGDTNYNGKFKGKATLTADKSSS
TAYMQLSSLTSEDSAVYFCARAYLLRLRRTGYYAMDYWGQGTSVTVSS (SEQ ID NO: 27)
VL Sequence:
DVVLTQTPLSLPVNIGDQASISCKSTKSLLNSDEFTYLDWYLQKPGQSPQLLIYLVSNRFSGVPDRFSGSGSGTDFTLKIS
RVEAEDLGVYYCFQSNYLPYTFGGGTKLEIK (SEQ ID NO: 28)

TABLE 15
Antibody 2B3 CDR Sequences

| | | Exemplary | IMGT | Kabat | Chothia | Contact | AbM |
|---|---|---|---|---|---|---|---|
| VH CDR | VH | GFTFSDYFMF | GFTFSDYF | DYFMF | GFTFSDY | SDYFMF | GFTFSDYFMF |
| Seq. | CDR1 | (SEQ ID NO: | (SEQ ID NO: | (SEQ ID NO: | (SEQ ID NO: | (SEQ ID | (SEQ ID NO: |
| | | 105) | 106) | 107) | 108) | NO: 109) | 105) |
| | VH | YISNDGDSTYY | ISNDGDST | YISNDGDSTYY | NDGD | WAYISNDGD | YISNDGDSTY |
| | CDR2 | PDTVQG (SEQ | (SEQ ID NO: | PDTVQG (SEQ | (SEQ ID NO: | ST | (SEQ ID NO: |
| | | ID NO: 191) | 192) | ID NO: 191) | 193) | Y | 195) |
| | | | | | | (SEQ ID NO: | |
| | | | | | | 194) | |
| | VH | QGAQATLDY | TRQGAQATLD | QGAQATLDY | GAQATLD | TRQGAQATLD | QGAQATLDY |
| | CDR3 | (SEQ ID NO: | Y | (SEQ ID NO: | (SEQ ID NO: | (SEQ ID NO: | (SEQ ID NO: |
| | | 273) | (SEQ ID NO: | 273) | 275) | 276) | 273) |
| | | | 274) | | | | |
| VL CDR | VL | SASSSVFYMH | SSVFY | SASSSVFYMH | SSSVFY | FYMHWY | SASSSVFYMH |
| Seq. | CDR1 | (SEQ ID NO: | (SEQ ID NO: | (SEQ ID NO: | (SEQ ID NO: | (SEQ ID NO: | (SEQ ID NO: |
| | | 349) | 350) | 349) | 351) | 352) | 349) |
| | VL | STSNLAS | STS | STSNLAS | STS | LLIYSTSNLA | STSNLAS |
| | CDR2 | (SEQ ID NO: | (SEQ ID NO: | (SEQ ID NO: | (SEQ ID NO: | (SEQ ID NO: | (SEQ ID NO: |
| | | 408) | 389) | 408) | 389) | 409) | 408) |
| | VL | HQWSST | HQWSST | HQWSST | WSS | HQWSS | HQWSST |
| | CDR3 | (SEQ ID NO: | (SEQ ID NO: | (SEQ ID NO: | (SEQ ID NO: | (SEQ ID NO: | (SEQ ID NO: |
| | | 462) | 462) | 462) | 463) | 464) | 462) |

VH Sequence:
EVKLVESGGGLVQPGGSLKLSCAASGFTFSDYFMFWVRQTPEKRLEWVAYISNDGDSTYYPDTVQGRFTISRDNAKNTL
YLQMSRLRSEDTAMYYCTRQGAQATLDYWGQGTTLTVSS (SEQ ID NO: 29)
VL Sequence:
QIVLTQSPAIMSASLGEEITLTCSASSSVFYMHWYQQKSGTSPKLLIYSTSNLASGIPSRFSGSGSGTFYSLTISSVEAEDA
ADYYCHQWSSTFGGGTKLEIK (SEQ ID NO: 30)

TABLE 16
Antibody 8C10 CDR Sequences

| | | Exemplary | IMGT | Kabat | Chothia | Contact | AbM |
|---|---|---|---|---|---|---|---|
| VH CDR | VH | GYTFANYGLT | GYTFANYG | NYGLT | GYTFANY | ANYGLT | GYTFANYGLT |
| Seq. | CDR1 | (SEQ ID NO: | (SEQ ID NO: | (SEQ ID NO: | (SEQ ID NO: | (SEQ ID NO: | (SEQ ID NO: |
| | | 110) | 111) | 112) | 113) | 114) | 110) |
| | VH | EIYPGSGHTHY | IYPGSGHT | EIYPGSGHTHY | PGSG | WIGEIYPGSGH | EIYPGSGHTH |
| | CDR2 | NEDFKG (SEQ | (SEQ ID NO: | NEDFKG | (SEQ ID NO: | TH | (SEQ ID NO: |
| | | ID NO: 196) | 197) | (SEQ ID NO: | 198) | (SEQ ID NO: | 200) |
| | | | | 196) | | 199) | |
| | VH | RIQLLLPVGGF | ARRIQLLLPVG | RIQLLLPVGGF | IQLLLPVGGFV | ARRIQLLLPVG | RIQLLLPVGGF |
| | CDR3 | VY (SEQ ID | GFVY (SEQ | VY (SEQ ID | (SEQ ID NO: | GF | VY |
| | | NO: 277) | ID NO: 278) | NO: 277) | 279) | V | (SEQ ID NO: |
| | | | | | | (SEQ ID NO: | 277) |
| | | | | | | 280) | |
| VL CDR | VL | RASQSISNNLH | QSISNN | RASQSISNNLH | SQSISNN | SNNLHWY | RASQSISNNLH |
| Seq. | CDR1 | (SEQ ID NO: | (SEQ ID NO: | (SEQ ID NO: | (SEQ ID NO: | (SEQ ID NO: | (SEQ ID NO: |
| | | 353) | 354) | 353) | 355) | 356) | 353) |
| | VL | YASQSIS | YAS | YASQSIS | YAS | LLIKYASQSI | YASQSIS |
| | CDR2 | (SEQ ID NO: | (SEQ ID NO: | (SEQ ID NO: | (SEQ ID NO: | (SEQ ID NO: | (SEQ ID NO: |
| | | 410) | 411) | 410) | 411) | 412) | 410) |
| | VL | QQSNSWPHT | QQSNSWPHT | QQSNSWPHT | SNSWPH | QQSNSWPH | QQSNSWPHT |
| | CDR3 | (SEQ ID NO: | (SEQ ID NO: | (SEQ ID NO: | (SEQ ID NO: | (SEQ ID NO: | (SEQ ID NO: |
| | | 465) | 465) | 465) | 466) | 467) | 465) |

VH Sequence:
QVQLQQSGVELARPGAAVKLSCKASGYTFANYGLTWVKQRTGQGLEWIGEIYPGSGHTHYNEDFKGKATLTADRSSST
AYMELRSLTSEDSAVYFCARRIQLLLPVGGFVYWGQGTLVTVSA (SEQ ID NO: 31)
VL Sequence:
DFVLTQSPATLSVTPGDSVSLSCRASQSISNNLHWYQQKSHESPRLLIKYASQSISGIPSRFSGSGSGTDFTLSINSVETE
DFGVYFCQQSNSWPHTFGGGTKLEIK (SEQ ID NO: 32)

TABLE 17
Antibody 2A9 CDR Sequences

| | | Exemplary | IMGT | Kabat | Chothia | Contact | AbM |
|---|---|---|---|---|---|---|---|
| VH CDR | VH | GFTFSTYAMS | GFTFSTYA | TYAMS | GFTFSTY | STYAMS | GFTFSTYAMS |
| Seq. | CDR1 | (SEQ ID NO: | (SEQ ID NO: | (SEQ ID NO: | (SEQ ID NO: | (SEQ ID NO: | (SEQ ID NO: |
| | | 115) | 116) | 117) | 118) | 119) | 115) |
| | VH | SITSGGTTYYT | ITSGGTT | SITSGGTTYYT | SGG | WASITSGGTT | SITSGGTTY |
| | CDR2 | DSVKG | (SEQ ID NO: | DSVKG | (SEQ ID NO: | Y | (SEQ ID NO: |
| | | (SEQ ID NO: | 202) | (SEQ ID NO: | 134) | (SEQ ID NO: | 204) |
| | | 201) | | 201) | | 203) | |
| | VH | DGNFYYYGMD | ARDGNFYYYG | DGNFYYYGMD | GNFYYYGMD | ARDGNFYYYG | DGNFYYYGMD |
| | CDR3 | Y | MDY | Y | (SEQ ID NO: | MD | Y |
| | | (SEQ ID NO: | (SEQ ID NO: | (SEQ ID NO: | 283) | (SEQ ID NO: | (SEQ ID NO: |
| | | 281) | 282) | 281) | | 284) | 281) |
| VL CDR | VL | KASQNVGTAV | QNVGTA | KASQNVGTAV | SQNVGTA | GTAVAWY | KASQNVGTAV |
| Seq. | CDR1 | A | (SEQ ID NO: | A | (SEQ ID NO: | (SEQ ID NO: | A |
| | | (SEQ ID NO: | 358) | (SEQ ID NO: | 359) | 360) | (SEQ ID NO: |
| | | 357) | | 357) | | | 357) |
| | VL | SASNRFT | SAS | SASNRFT | SAS | ILIYSASNRF | SASNRFT |
| | CDR2 | (SEQ ID NO: | (SEQ ID NO: | (SEQ ID NO: | (SEQ ID NO: | (SEQ ID NO: | (SEQ ID NO: |
| | | 413) | 414) | 413) | 414) | 415) | 413) |
| | VL | QQYSSYFT | QQYSSYFT | QQYSSYFT | YSSYF | QQYSSYF | QQYSSYFT |
| | CDR3 | (SEQ ID NO: | (SEQ ID NO: | (SEQ ID NO: | (SEQ ID NO: | (SEQ ID NO: | (SEQ ID NO: |
| | | 468) | 468) | 468) | 469) | 470) | 468) |

VH Sequence:
EVKLVESGGGLVKPGGSLKLSCAASGFTFSTYAMSWVRQTPEKRLEWVASITSGGTTYYTDSVKGRFTISRDNARNILYL
QMSSLRSEDTAMYYCARDGNFYYYGMDYWGQGTSVTVSS (SEQ ID NO: 33)
VL Sequence:
DIVMTQSQKFMSTSVGDRVSITCKASQNVGTAVAWYQQKPGQSPKILIYSASNRFTGVPDRFTGSGSGTDFTLTISNMQS
EDLADYFCQQYSSYFTFGGGTKLELK (SEQ ID NO: 34)

TABLE 18
Antibody 24G2 CDR Sequences

| | | Exemplary | IMGT | Kabat | Chothia | Contact | AbM |
|---|---|---|---|---|---|---|---|
| VH CDR | VH | GYTFTTYWMH | GYTFTTYW | TYWMH | GYTFTTY | TTYWMH | GYTFTTYWMH |
| Seq. | CDR1 | (SEQ ID NO: | (SEQ ID NO: | (SEQ ID NO: | (SEQ ID NO: | (SEQ ID NO: | (SEQ ID NO: |
| | | 120) | 121) | 122) | (80) | 123) | 120) |
| | VH | MIHPNSGSSNY | IHPNSGSS | MIHPNSGSSNY | PNSG | WIGMIHPNSGS | MIHPNSGSSN |
| | CDR2 | NEKFKN (SEQ | (SEQ ID NO: | NEKFKN | (SEQ ID NO: | SN (SEQ ID | (SEQ ID NO: |
| | | ID NO: 205) | 206) | (SEQ ID NO: | 207) | NO: 208) | 209) |
| | | | | 205) | | | |
| | VH | SDYGFIPYFDY | ARSDYGFIPYF | SDYGFIPYFDY | DYGFIPYFD | ARSDYGFIPYF | SDYGFIPYFDY |
| | CDR3 | (SEQ ID NO: | DY (SEQ ID | (SEQ ID NO: | (SEQ ID NO: | D (SEQ ID | (SEQ ID NO: |
| | | 285) | NO: 286) | 285) | 287) | NO: 288) | 285) |
| VL CDR | VL | RASQSIGTSIH | QSIGTS | RASQSIGTSIH | SQSIGTS | GTSIHWY | RASQSIGTSIH |
| Seq. | CDR1 | (SEQ ID NO: | (SEQ ID NO: | (SEQ ID NO: | (SEQ ID NO: | (SEQ ID NO: | SEQ ID NO: |
| | | 361) | 362) | 361) | 363) | 364) | 361) |
| | VL | YASESIS | YAS | YASESIS | YAS | LLIKYASESI | YASESIS |
| | CDR2 | (SEQ ID NO: | (SEQ ID NO: | (SEQ ID NO: | (SEQ ID NO: | (SEQ ID NO: | (SEQ ID NO: |
| | | 416) | 411) | 416) | 411) | 417) | 416) |
| | VL | QQSNSWPTFT | QQSNSWPTFT | QQSNSWPTFT | SNSWPTF | QQSNSWPTF | QQSNSWPTFT |
| | CDR3 | (SEQ ID NO: | (SEQ ID NO: | (SEQ ID NO: | (SEQ ID NO: | (SEQ ID NO: | (SEQ ID NO: |
| | | 471) | 471) | 471) | 472) | 473) | 471) |

VH Sequence:
QVQLQQSGAELLKPGASVKLSCKASGYTFTTYWMHWVKQRPGQGLEWIGMIHPNSGSSNYNEKFKNKATLTVDKSSST
AYMQLSSLTSEDSAVYFCARSDYGFIPYFDYWGQGTTLTVSS (SEQ ID NO: 35)
VL Sequence:
DILLTQSPAILSVSPGERVSFSCRASQSIGTSIHWYQQRTNGSPRLLIKYASESISGIPSRFSGSGSGTDFTLIINSVESEDIA
DYYCQQSNSWPTFTFGAGTKLELK (SEQ ID NO: 36)

TABLE 19
Antibody 6G9 CDR Sequences

| | | Exemplary | IMGT | Kabat | Chothia | Contact | AbM |
|---|---|---|---|---|---|---|---|
| VH CDR | VH | GYTFTSYWMQ | GYTFTSYW | SYWMQ | GYTFTSY | TSYWMQ | GYTFTSYWMQ |
| Seq. | CDR1 | (SEQ ID NO: | (SEQ ID NO: | (SEQ ID NO: | (SEQ ID NO: | (SEQ ID NO: | (SEQ ID NO: |
| | | 124) | 73) | 125) | 75) | 126) | 124) |
| | VH | EIDPSDSYTNY | IDPSDSYT | EIDPSDSYTNY | PSDS | WIGEIDPSDSY | EIDPSDSYTN |
| | CDR2 | NQKFKG | (SEQ ID NO: | NQKFKG | (SEQ ID NO: | TN | (SEQ ID NO: |
| | | (SEQ ID NO: | 211) | (SEQ ID NO: | 212) | (SEQ ID NO: | 214) |
| | | 210) | | 210) | | 213) | |
| | VH | PLDRSAYYFDY | ARPLDRSAYYF | PLDRSAYYFDY | LDRSAYYFD | ARPLDRSAYYF | PLDRSAYYFDY |
| | CDR3 | (SEQ ID NO: | DY | (SEQ ID NO: | (SEQ ID NO: | D | (SEQ ID NO: |
| | | 289) | (SEQ ID NO: | 289) | 291) | (SEQ ID NO: | 289) |
| | | | 290) | | | 292) | |
| VL CDR | VL | RASESVDFSG | ESVDFSGNSF | RASESVDFSG | SESVDFSGNS | DFSGNSFMHW | RASESVDFSG |
| Seq. | CDR1 | NSFMH SEQ | (SEQ ID NO: | NSFMH | F | Y | NSFMH |
| | | ID NO: 365) | 366) | (SEQ ID NO: | (SEQ ID NO: | (SEQ ID NO: | (SEQ ID NO: |
| | | | | 365) | 367) | 368) | 365) |
| | VL | RASNLDS | RAS | RASNLDS | RAS | LLIYRASNLD | RASNLDS |
| | CDR2 | (SEQ ID NO: | (SEQ ID NO: | (SEQ ID NO: | (SEQ ID NO: | (SEQ ID NO: | (SEQ ID NO: |
| | | 418) | 419) | 418) | 419) | 420) | 418) |
| | VL | QQSNEDPYT | QQSNEDPYT | QQSNEDPYT | SNEDPY | QQSNEDPY | QQSNEDPYT |
| | CDR3 | (SEQ ID NO: | (SEQ ID NO: | (SEQ ID NO: | (SEQ ID NO: | (SEQ ID NO: | (SEQ ID NO: |
| | | 474) | 474) | 474) | 475) | 476) | 474) |

VH Sequence:
QVQLHQPGAELVKPGASVKLSCKTSGYTFTSYWMQWVKQRPGQGLEWIGEIDPSDSYTNYNQKFKGKATLTVDTSSTT
AYMQLSSLTSEDSAVYYCARPLDRSAYYFDYWGQGTTLTVSS (SEQ ID NO: 37)
VL Sequence:
DIVLTQSPASLAVSLGQRATISCRASESVDFSGNSFMHWYQQKPGQPPKLLIYRASNLDSGIPARFSGVGSRTDFTLTINP
VEADDVATYYCQQSNEDPYTFGGGTKLEIE (SEQ ID NO: 38)

TABLE 20
Antibody 2B11 CDR Sequences

| | | Exemplary | IMGT | Kabat | Chothia | Contact | AbM |
|---|---|---|---|---|---|---|---|
| VH CDR | VH | GYSITSGYYW | GYSITSGYY | SGYYWN | GYSITSGY | TSGYYWN | GYSITSGYYW |
| Seq. | CDR1 | Z | (SEQ ID NO: | (SEQ ID NO: | (SEQ ID NO: | (SEQ ID NO: | N |
| | | (SEQ ID NO: | 128) | 129) | 130) | 131) | (SEQ ID NO: |
| | | 127) | | | | | 127) |
| | VH | HIANDGSNYYN | IANDGSN | HIANDGSNYYN | NDG | WMGHIANDGS | HIANDGSNY |
| | CDR2 | PFLKH | (SEQ ID NO: | PFLKH | (SEQ ID NO: | NY | (SEQ ID NO: |
| | | (SEQ ID NO: | 216) | (SEQ ID NO: | 217) | (SEQ ID NO: | 219) |
| | | 215) | | 215) | | 218) | |
| | VH | GGSYFDYVDY | ARGGSYFDYV | GGSYFDYVDY | GSYFDYVD | ARGGSYFDYV | GGSYFDYVDY |
| | CDR3 | (SEQ ID NO: | DY | (SEQ ID NO: | SEQ ID NO: | D | (SEQ ID NO: |
| | | 293) | (SEQ ID NO: | 293) | 295) | (SEQ ID NO: | 293) |
| | | | 294) | | | 296) | |
| VL CDR | VL | RASQDISNYLN | QDISNY | RASQDISNYLN | SQDISNY | SNYLNWY | RASQDISNYLN |
| Seq. | CDR1 | (SEQ ID NO: | (SEQ ID NO: | (SEQ ID NO: | (SEQ ID NO: | (SEQ ID NO: | (SEQ ID NO: |
| | | 369) | 370) | 369) | 371) | 372) | 369) |
| | VL | YTSRLHS | YTS | YTSRLHS | YTS | LLIYYTSRLH | YTSRLHS |
| | CDR2 | (SEQ ID NO: | (SEQ ID NO: | (SEQ ID NO: | (SEQ ID NO: | (SEQ ID NO: | (SEQ ID NO: |
| | | 421) | 405) | 421) | 405) | 422) | 421) |
| | VL | QQGNTLPFT | QQGNTLPFT | QQGNTLPFT | GNTLPF | QQGNTLPF | QQGNTLPFT |
| | CDR3 | (SEQ ID NO: | (SEQ ID NO: | (SEQ ID NO: | (SEQ ID NO: | (SEQ ID NO: | (SEQ ID NO: |
| | | 477) | 477) | 477) | 478) | 479) | 477) |

VH Sequence:
DVQLQESGPGLVKPSQSLSLTCSVTGYSITSGYYWNWIRQFPGNKLEWMGHIANDGSNYYNPFLKHRVSITRDTSKNQF
FLKLNSVTIQDTATYYCARGGSYFDYVDYWGQGTTLTVSS (SEQ ID NO: 39)
VL Sequence:
DIQMTQTTSSLSASLGDRVTINCRASQDISNYLNWYQQKPDGTVKLLIYYTSRLHSGVPSRFSGSGSGTDYSLTITNLEQE
DIATYFCQQGNTLPFTFGSGTKLEIK (SEQ ID NO: 40)

TABLE 21
Antibody 1A3 CDR Sequences

| | | Exemplary | IMGT | Kabat | Chothia | Contact | AbM |
|---|---|---|---|---|---|---|---|
| VH CDR | VH | GFTFTDYYMN | GFTFTDYY | DYYMN | GFTFTDY | TDYYMN | GFTFTDYYMN |
| Seq. | CDR1 | (SEQ ID NO: | (SEQ ID NO: | (SEQ ID NO: | (SEQ ID NO: | (SEQ ID NO: | (SEQ ID NO: |
| | | 488) | 1795) | 490) | 1796) | 491) | 488) |
| | VH | DIIPNNGVTSYNQ | IIPNNGVT | DIIPNNGVTSYNQ | PNNG | WIGDIIPNNGVTS | DIIPNNGVTS |
| | CDR2 | KFKG (SEQ ID | (SEQ ID NO: | KFKG (SEQ ID | (SEQ ID NO: | (SEQ ID NO: | (SEQ ID NO: |
| | | NO: 497) | 498) | NO: 497) | 499) | 500) | 501) |
| | VH | EWLLRGMDY | AREWLLRGMDY | EWLLRGMDY | WLLRGMD | AREWLLRGMD | EWLLRGMDY |
| | CDR3 | (SEQ ID NO: | (SEQ ID NO: | (SEQ ID NO | (SEQ ID NO: | (SEQ ID NO: | (SEQ ID NO: |
| | | 515) | 516) | 515) | 517) | 518) | 515) |
| VL CDR | VL | RSSKSLLHSNGIT | KSLLHSNGITY | RSSKSLLHSNGIT | SKSLLHSNGITY | LHSNGITYLYWY | RSSKSLLHSNGIT |
| Seq. | CDR1 | YLY (SEQ ID | (SEQ ID NO: | YLY (SEQ ID | (SEQ ID NO: | (SEQ ID NO: | YLY (SEQ ID |
| | | NO: 531) | 532) | NO: 531) | 533) | 534) | NO: 531) |
| | VL | QMSNLAS | QMS | QMSNLAS | QMS | LLIYQMSNLA | QMSNLAS |
| | CDR2 | (SEQ ID NO: | (SEQ ID NO: | (SEQ ID NO: | (SEQ ID NO: | (SEQ ID NO: | (SEQ ID NO: |
| | | 547) | 548) | 547) | 548) | 549) | 547) |
| | VL | AQHLELTWT | AQHLELTWT | AQHLELTWT | HLELTW | AQHLELTW | AQHLELTWT |
| | CDR3 | (SEQ ID NO: | (SEQ ID NO: | (SEQ ID NO: | (SEQ ID NO: | (SEQ ID NO: | (SEQ ID NO: |
| | | 558) | 558) | 558) | 559) | 560) | 558) |

VH Sequence:
EVQLQQSGPELVKPGASVKISCKASGFTFTDYYMNWVKQSHGKSLEWIGDIIPNNGVTSYNQKFKGKATLTVDKSSSTAYMELRSLTSEDSAVYY
CAREWLLRGMDYWGQGTSVTVSS (SEQ ID NO: 480)
VL Sequence:
DIVMTQAAFSNPVTLGTSASISCRSSKSLLHSNGITYLYWYLQKPGQSPQLLIYQMSNLASGVPDRFSSSGSGTDFTLRISRVEAEDVGVYYCAQH
LELTWTFGGGTKLEIK (SEQ ID NO: 481)

TABLE 22
Antibody P1B6 CDR Sequences

| | | Exemplary | IMGT | Kabat | Chothia | Contact | AbM |
|---|---|---|---|---|---|---|---|
| VH | VH | GYTFTDYYMN | GYTFTDYY | DYYMN | GYTFTDY | TDYYMN | GYTFTDYYMN |
| CDR | CDR1 | (SEQ ID NO: | (SEQ ID NO: | (SEQ ID NO: | (SEQ ID NO: | (SEQ ID NO: | (SEQ ID NO: |
| Seq. | | 489) | 57) | 490) | 49) | 491) | 489) |
| | VH | DINPNNGGPIY | INPNNGGP | DINPNNGGPIY | PNNG | WIGDINPNNGG | DINPNNGGPI |
| | CDR2 | NQKFKG (SEQ | (SEQ ID NO: | NQKFKG (SEQ | (SEQ ID NO: | PI | (SEQ ID NO: |
| | | ID NO: 502) | 503) | ID NO: 502) | 499) | (SEQ ID NO: | 505) |
| | | | | | | 504) | |
| | VH | SDSAWFTY | ARSDSAWFTY | SDSAWFTY | DSAWFT | ARSDSAWFT | SDSAWFTY |
| | CDR3 | (SEQ ID NO: | (SEQ ID NO: | (SEQ ID NO: | (SEQ ID NO: | (SEQ ID NO: | (SEQ ID NO: |
| | | 519) | 520) | 519) | 521) | 522) | 519) |
| VL | VL | SASSSVSYMY | SSVSY | SASSSVSYMY | SSSVSY | SYMYWY | SASSSVSYMY |
| CDR | CDR1 | (SEQ ID NO: | (SEQ ID NO: | (SEQ ID NO: | (SEQ ID NO: | (SEQ ID NO: | (SEQ ID NO: |
| Seq. | | 535) | 536) | 535) | 537) | 538) | 535) |
| | VL | DTSNLAS | DTS | DTSNLAS | DTS | LLIYDTSNLA | DTSNLAS |
| | CDR2 | (SEQ ID NO: | (SEQ ID NO: | (SEQ ID NO: | (SEQ ID NO: | (SEQ ID NO: | (SEQ ID NO: |
| | | 550) | 551) | 550) | 551) | 552) | 550) |
| | VL | QQWNSYPPT | QQWNSYPPT | QQWNSYPPT | WNSYPP | QQWNSYPP | QQWNSYPPT |
| | CDR3 | (SEQ ID NO: | (SEQ ID NO: | (SEQ ID NO: | (SEQ ID NO: | (SEQ ID NO: | (SEQ ID NO: |
| | | 561) | 561) | 561) | 562) | 563) | 561) |

VH Sequence:
EVQLQQSGPELVKPGASVKMSCKASGYTFTDYYMNWVKQTHGKSLEWIGDINPNNGGPIYNQKFKGKATLTVDKSSSTAYMELRSL
TSEDSAVYYCARSDSAWFTYWGQGTLVTVSA (SEQ ID NO: 482)
VL Sequence:
QIVLTQSPAIMSASPGEKVTMTCSASSSVSYMYWYQQKPGSSPRLLIYDTSNLASGVPVRFSGSGSGTFYSITISRMEAEDAATYYC
QQWNSYPPTFGGGTKLEIK (SEQ ID NO: 483)

TABLE 23
Antibody P1H8 CDR Sequences

| | | Exemplary | IMGT | Kabat | Chothia | Contact | AbM |
|---|---|---|---|---|---|---|---|
| VH | VH | GYTFTDYYMN | GYTFTDYY | DYYMN | GYTFTDY | TDYYMN | GYTFTDYYMN |
| CDR | CDR1 | (SEQ ID NO: | (SEQ ID NO: | (SEQ ID NO: | (SEQ ID | (SEQ ID NO: | (SEQ ID NO: |
| Seq. | | 489) | 57) | 490) | NO: 49 | 491) | 489) |
| | VH | DINPNNGGTTY | INPNNGGT | DINPNNGGTTY | PNNG | WIGDINPNNGG | DINPNNGGTT |
| | CDR2 | NQKFKG (SEQ | (SEQ ID NO: | NQKFKG (SEQ | (SEQ ID NO: | TT (SEQ ID | (SEQ ID NO: |
| | | ID NO: 506) | 507) | ID NO: 506) | 499) | NO: 508) | 509) |
| | VH | QGPWYFDV | ARQGPWYFDV | QGPWYFDV | GPWYFD | ARQGPWYFD | QGPWYFDV |
| | CDR3 | (SEQ ID NO: | (SEQ ID NO: | (SEQ ID NO: | (SEQ ID NO: | (SEQ ID NO: | (SEQ ID NO: |
| | | 523) | 524) | 523) | 525) | 526) | 523) |
| VL | VL | RSSQTIVHSNG | QTIVHSNGYTY | RSSQTIVHSNG | SQTIVHSNGYT | VHSNGYTYLEW | RSSQTIVHSNG |
| CDR | CDR1 | YTYLE (SEQ | (SEQ ID NO: | YTYLE (SEQ | Y | Y | YTYLE (SEQ |
| Seq. | | ID NO: 539) | 540) | ID NO: 539) | (SEQ ID NO: | (SEQ ID NO: | ID O: 539) |
| | | | | | 541) | 542) | |
| | VL | KVSNRFS | KVS | KVSNRFS | KVS | LLIYKVSNRF | KVSNRFS |
| | CDR2 | (SEQ ID NO: | (SEQ ID NO: | (SEQ ID NO: | (SEQ ID NO: | (SEQ ID NO: | (SEQ ID NO: |
| | | 553) | 554) | 553) | 554) | 555) | 553) |
| | VL | FQGSHVPWT | FQGSHVPWT | FQGSHVPWT | QGSHVPW | FQGSHVPW | FQGSHVPWT |
| | CDR3 | (SEQ ID NO: | (SEQ ID NO: | (SEQ ID NO: | (SEQ ID NO: | (SEQ ID NO: | (SEQ ID NO: |
| | | 564) | 564) | 564) | 565) | 566) | 564) |

VH Sequence:
EVQLQQSGPELVKPGASVKISCKASGYTFTDYYMNWVKQSHGKSLEWIGDINPNNGGTTYNQKFKGKATLTVDKSSSTAYMELRSL
TSEDSAVYYCARQGPWYFDVWGTGTTVTVSS (SEQ ID NO: 484)
VL Sequence:
DVLMTQTPLSLPVSLGDQASISCRSSQTIVHSNGYTYLEWYLQKPGQSPKLLIYKVSNRFSGVPDRFSGSGSGTDFTLKISRVEAEDL
GVYYCFQGSHVPWTFGGGTKLEIK (SEQ ID NO: 485)

TABLE 24
Antibody P8G4 CDR Sequences

| | | Exemplary | IMGT | Kabat | Chothia | Contact | AbM |
|---|---|---|---|---|---|---|---|
| VH | VH | GFSLTSYGVH | GFSLTSYG | SYGVH | GFSLTSY | TSYGVH | GFSLTSYGVH |
| CDR | CDR1 | (SEQ ID NO: | (SEQ ID NO: | (SEQ ID NO: | (SEQ ID NO: | (SEQ ID NO: | (SEQ ID NO: |
| Seq. | | 492) | 493) | 494) | 495) | 496) | 492) |
| | VH | VLWSGGSTD | LWSGGST | VLWSGGSTD | GGS | WLGVLWSGG | VLWSGGSTD |
| | CDR2 | YNAAFIS (SEQ | (SEQ ID NO: | YNAAFIS (SEQ | (SEQ ID NO: | STD (SEQ ID | (SEQ ID NO: |
| | | ID NO: 510) | 511) | ID NO: 510) | 512) | NO: 513) | 514) |
| | VH | NFGDY | ARNFGDY | NFGDY | FGD | ARNFGD | NFGDY |
| | CDR3 | (SEQ ID NO: | (SEQ ID NO: | (SEQ ID NO: | (SEQ ID NO: | (SEQ ID NO: | (SEQ ID NO: |
| | | 527) | 528) | 527) | 529) | 530) | 527) |
| VL | VL | SASSRVSYMH | SRVSY | SASSRVSYMH | SSRVSY | SYMHWY | SASSRVSYMH |
| CDR | CDR1 | (SEQ ID NO: | (SEQ ID NO: | (SEQ ID NO: | (SEQ ID NO: | (SEQ ID NO: | (SEQ ID NO: |
| Seq. | | 543) | 544) | 543) | 545) | 546) | 543) |
| | VL | DTSKLAS | DTS | DTSKLAS | DTS | RWIYDTSKLA | DTSKLAS |
| | CDR2 | (SEQ ID NO: | (SEQ ID NO: | (SEQ ID NO: | (SEQ ID NO: | (SEQ ID NO: | (SEQ ID NO: |
| | | 556) | 551) | 556) | 551) | 557) | 556) |
| | VL | QQWNNNPPT | QQWNNNPPT | QQWNNNPPT | WNNNPP | QQWNNNPP | QQWNNNPPT |
| | CDR3 | (SEQ ID NO: | (SEQ ID NO: | (SEQ ID NO: | (SEQ ID NO: | (SEQ ID NO: | (SEQ ID NO: |
| | | 567) | 567) | 567) | 568) | 569) | 567) |

VH Sequence:
QVQLKQSGPGLVQPSQSLSITCTVSGFSLTSYGVHWVRQSPGKGLDWLGVLWSGGSTDYNAAFISRLSISKDNSKSQV
FFKMNSLQADDTAIYYCARNFGDYWGQGTSVTVSS (SEQ ID NO: 486)
VL Sequence:
QIVLTQSPAIMSASPGEKVTMTCSASSRVSYMHWYQQKSGTSPKRWIYDTSKLASGVPARFSGSGSGTSYSLTISSMEA
EDAATYYCQQWNNNPPTFGAGTTLELK (SEQ ID NO: 487)

[0280] In some embodiments, the antibodies provided herein comprise a VH region or VH domain In other embodiments, the antibodies provided herein comprise a VL region or VL chain. In some embodiments, the antibodies provided herein have a combination of (i) a VH domain or VH region; and/or (ii) a VL domain or VL region.

[0281] In some embodiments, an antibody provided herein comprises or consists of six CDRs, for example, VH CDR1, VH CDR2, VH CDR3, VL CDR1, VL CDR2, and/or VL CDR3 identified in Tables 1-24. In some embodiments, an antibody provided herein can comprise less than six CDRs. In some embodiments, the antibody comprises or consists of one, two, three, four, or five CDRs selected from the group consisting of VH CDR1, VH CDR2, VH CDR3, VL CDR1, VL CDR2, and/or VL CDR3 identified in Tables 1-24. In some embodiments, the antibody comprises or consists of one, two, three, four, or five CDRs selected from the group consisting of VH CDR1, VH CDR2, VH CDR3, VL CDR1, VL CDR2, and/or VL CDR3 of the murine monoclonal antibody selected from the group consisting of: (a) the antibody designated 1C1; (b) the antibody designated 3P10; (c) the antibody designated 12A3; (d) the antibody designated 5F12; (e) the antibody designated 5A20; (f) the antibody designated 8D8; (g) the antibody designated 17J16; (h) t the antibody designated 25M22; (i) the antibody designated 2B8; (j) the antibody designated 22N5; (k) the antibody designated 2I23; (l) the antibody designated 6N16; (m) the antibody designated 1B3; (n) the antibody designated 19K19; (o) the antibody designated 2B3; (p) the antibody designated 8C10; (q) the antibody designated 2A9; (r) the antibody designated 24G2; (s) the antibody designated 6G9; (t) the antibody designated 2B11; (u) the antibody designated 1A3; (v) the antibody designated P1B6; (w) the antibody designated P1H8; or (x) the antibody designated P8G4 described herein. Accordingly, in some embodiments, the antibody comprises or consists of one, two, three four or five CDRs of anyone of the VH CDR1, VH CDR2, VH CDR3, VL CDR1, VL CDR2, and/or VL CDR3 identified in Tables 1-24.

[0282] In some embodiments, the antibodies provided herein comprise or consist of one or more (e.g., one, two or three) VH CDRs listed in Tables 1-24. In other embodiments, the antibodies provided herein comprise one or more (e.g., one, two or three) VL CDRs listed in Tables 1-24. In yet other embodiments, the antibodies provided herein comprise one or more (e.g., one, two or three) VH CDRs listed in Tables 1-24 and one or more VL CDRs listed in Tables 1-24. Accordingly, in certain embodiments, the antibodies comprise a VH CDR1 having the amino acid sequence of any one of SEQ ID NOS: 57, 49, 57, 49, 221-296, 515-530, 488-493, 1795, 1796, 488-493, 1795, 1796. In another embodiment, the antibodies comprise a VH CDR2 having the amino acid sequence of any one of SEQ ID NOS: 132-220, 497-514. In another embodiment, the antibodies comprise a VH CDR3 having the amino acid sequence of any one of SEQ ID NOS: 57, 49, 57, 49, 221-296, 515-530, 488-493, 1795, 1796, 488-493, 1795, 1796. In certain embodiments, the antibodies comprise a VH CDR1 and/or a VH CDR2 and/or a VH CDR3 independently selected from a VH CDR1, VH CDR2, VH CDR3 as depicted in any one of the amino acid sequences depicted in Table 1-24. In certain embodiments, the antibodies comprise a VL CDR1 having the amino acid sequence of any one of SEQ ID NOS: 297-372, 531-546. In another embodiment, the antibodies comprise a VL CDR2 having the amino acid sequence of any one of SEQ ID NOS: 373-422. In another embodiment, the antibodies comprise a VL CDR3 having the amino acid sequence of any one of SEQ ID NOS: 423-479, 558-569. In certain embodiments, the antibodies comprise a VL CDR1 and/or a VL CDR2 and/or a VL CDR3 independently selected from a VL CDR1, VL CDR2, VL CDR3 as depicted in any one of the amino acid sequences depicted in Tables 1-24.

[0283] Also provided herein are antibodies comprising one or more (e.g., one, two or three) VH CDRs and one or more (e.g., one, two or three) VL CDRs listed in Tables 1-24. In particular, provided herein is an antibody comprising: a VH CDR1 (SEQ ID NOS: 57, 49, 221-296, 515-530, 488-493, 1795, 1796) and a VL CDR1 (SEQ ID NOS: 297-372, 531-546); a VH CDR1 (SEQ ID NOS: 57, 49, 221-296, 515-530, 488-493, 1795, 1796) and a VL CDR2 (SEQ ID NOS: 373-422); a VH CDR1 (SEQ ID NOS: 57, 49, 221-296, 515-530, 488-493, 1795, 1796) and a VL CDR3 (SEQ ID NOS: 423-479, 558-569); a VH CDR2 (SEQ ID NOS: 132-220, 497-514) and a VL CDR1 (SEQ ID NOS: 297-372, 531-546); a VH CDR2 (SEQ ID NOS: 132-220, 497-514) and a VL CDR2 (SEQ ID NOS: 373-422); a VH CDR2 (SEQ ID NOS: 132-220, 497-514) and a VL CDR3 (SEQ ID NOS: 423-479, 558-569); a VH CDR3 (SEQ ID NOS: 57, 49, 221-296, 515-530, 488-493, 1795, 1796) and a VL CDR1 (SEQ ID NOS: 297-372, 531-546); a VH CDR3 (SEQ ID NOS: 57, 49, 221-296, 515-530, 488-493, 1795, 1796) and a VL CDR2 (SEQ ID NOS: 373-422); a VH CDR3 (SEQ ID NOS: 57, 49, 221-296, 515-530, 488-493, 1795, 1796) and a VL CDR3 (SEQ ID NOS: 423-479, 558-569); a VH CDR1 (SEQ ID NOS: 57, 49, 221-296, 515-530, 488-493, 1795, 1796), a VH CDR2 (SEQ ID NOS: 132-220, 497-514) and a VL CDR1 (SEQ ID NOS: 297-372, 531-546); a VH CDR1 (SEQ ID NOS: 57, 49, 221-296, 515-530, 488-493, 1795, 1796), a VH CDR2 (SEQ ID NOS: 132-220, 497-514) and a VL CDR2 (SEQ ID NOS: 373-422); a VH CDR1 (SEQ ID NOS: 57, 49, 221-296, 515-530, 488-493, 1795, 1796), a VH CDR2 (SEQ ID NOS: 132-220, 497-514) and a VL CDR3 (SEQ ID NOS: 423-479, 558-569); a VH CDR2 (SEQ ID NOS: 132-220, 497-514), a VH CDR3 (SEQ ID NOS: 57, 49, 221-296, 515-530, 488-493, 1795, 1796) and a VL CDR1 (SEQ ID NOS: 297-372, 531-546), a VH CDR2 (SEQ ID NOS: 132-220, 497-514), a VH CDR3 (SEQ ID NOS: 57, 49, 221-296, 515-530, 488-493, 1795, 1796) and a VL CDR2 (SEQ ID NOS: 373-422); a VH CDR2 (SEQ ID NOS: 132-220, 497-514), a VH CDR3 (SEQ ID NOS: 57, 49, 221-296, 515-530, 488-493, 1795, 1796) and a VL CDR3 (SEQ ID NOS: 423-479, 558-569); a VH CDR1 (SEQ ID NOS: 57, 49, 221-296, 515-530, 488-493, 1795, 1796), a VL CDR1 (SEQ ID NOS: 297-372, 531-546) and a VL CDR2 (SEQ ID NOS: 373-422); a VH CDR1 (SEQ ID NOS: 57, 49, 221-296, 515-530, 488-493, 1795, 1796), a VL CDR1 (SEQ ID NOS: 297-372, 531-546) and a VL CDR3 (SEQ ID NOS: 423-479, 558-569); a VH CDR1 (SEQ ID NOS: 57, 49, 221-296, 515-530, 488-493, 1795, 1796), a VL CDR2 (SEQ ID NOS: 373-422) and a VL CDR3 (SEQ ID NOS: 423-479, 558-569); a VH CDR2 (SEQ ID NOS: 132-220, 497-514), a VL CDR1 (SEQ ID NOS: 297-372, 531-546) and a VL CDR2 (SEQ ID NOS: 373-422); a VH CDR2 (SEQ ID NOS: 132-220, 497-514), a VL CDR1 (SEQ ID NOS: 297-372, 531-546) and a VL CDR3 (SEQ ID NOS: 423-479, 558-569); a VH CDR2 (SEQ ID NOS: 132-220, 497-514), a VL CDR2 (SEQ ID NOS: 373-422) and a VL CDR3 (SEQ ID NOS: 423-479, 558-569); a VH CDR3 (SEQ ID NOS: 57, 49, 221-296, 515-530, 488-493, 1795, 1796), a VL CDR1 (SEQ ID NOS: 297-372, 531-546) and a VL CDR2 (SEQ ID NOS: 373-422); a VH CDR3 (SEQ ID NOS: 57, 49, 221-296, 515-530, 488-493, 1795, 1796), a VL CDR1 (SEQ ID NOS: 297-372, 531-546) and a VL CDR3 (SEQ ID NOS: 423-479, 558-569); a VH CDR3 (SEQ ID NOS: 57, 49, 221-296, 515-530, 488-493, 1795, 1796), a VL CDR2 (SEQ ID NOS: 373-422) and a VL CDR3 (SEQ ID NOS: 423-479, 558-569); a VH CDR1 (SEQ ID NOS: 57, 49, 221-296, 515-530, 488-493, 1795, 1796), a VH CDR2 (SEQ ID NOS: 132-220, 497-514), a VH CDR3 (SEQ ID NOS: 57, 49, 221-296, 515-530, 488-493, 1795, 1796) and a VL CDR1 (SEQ ID NOS: 297-372, 531-546); a VH CDR1 (SEQ ID NOS: 57, 49, 221-296, 515-530, 488-493, 1795, 1796), a VH CDR2 (SEQ ID NOS: 132-220, 497-514), a VH CDR3 (SEQ ID NOS: 57, 49, 221-296, 515-530, 488-493, 1795, 1796) and a VL CDR2 (SEQ ID NOS: 373-422); a VH CDR1 (SEQ ID NOS: 57, 49, 221-296, 515-530, 488-493, 1795, 1796), a VH CDR2 (SEQ ID NOS: 132-220, 497-514), a VH CDR3 (SEQ ID NOS: 57, 49, 221-296, 515-530, 488-493, 1795, 1796) and a VL CDR3 (SEQ ID NOS: 423-479, 558-569); a VH CDR1 (SEQ ID NOS: 57, 49, 221-296, 515-530, 488-493, 1795, 1796), a VH CDR2 (SEQ ID NOS: 132-220, 497-514), a VL CDR1 (SEQ ID NOS: 297-372, 531-546) and a VL CDR2 (SEQ ID NOS: 373-422); a VH CDR1 (SEQ ID NOS: 57, 49, 221-296, 515-530, 488-493, 1795, 1796), a VH CDR2 (SEQ ID NOS: 132-220, 497-514), a VL CDR1 (SEQ ID NOS: 297-372, 531-546) and a VL CDR3 (SEQ ID NOS: 423-479, 558-569); a VH CDR1 (SEQ ID NOS: 57, 49, 221-296, 515-530, 488-493, 1795, 1796), a VH CDR2 (SEQ ID NOS: 132-220, 497-514), a VL CDR2 (SEQ ID NOS: 373-422) and a VL CDR3 (SEQ ID NOS: 423-479, 558-569); a VH CDR1 (SEQ ID NOS: 57, 49, 221-296, 515-530, 488-493, 1795, 1796), a VH CDR3 (SEQ ID NOS: 57, 49, 221-296, 515-530, 488-493, 1795, 1796), a VL CDR1 (SEQ ID NOS: 297-372, 531-546) and a VL CDR2 (SEQ ID NOS: 373-422); a VH CDR1 (SEQ ID NOS: 57, 49, 221-296, 515-530, 488-493, 1795, 1796), a VH CDR3 (SEQ ID NOS: 57, 49, 221-296, 515-530, 488-493, 1795, 1796), a VL CDR1 (SEQ ID NOS: 297-372, 531-546) and a VL CDR3 (SEQ ID NOS: 423-479, 558-569); a VH CDR1 (SEQ ID NOS: 57, 49, 221-296, 515-530, 488-493, 1795, 1796), a VH CDR3 (SEQ ID NOS: 57, 49, 221-296, 515-530, 488-493, 1795, 1796), a VL CDR2 (SEQ ID NOS: 373-422) and a VL CDR3 (SEQ ID NOS: 423-479, 558-569); a VH CDR2 (SEQ ID NOS: 132-220, 497-514), a VH CDR3 (SEQ ID NOS: 57, 49, 221-296, 515-530, 488-493, 1795, 1796), a VL CDR1 (SEQ ID NOS: 297-372, 531-546) and a VL CDR2 (SEQ ID NOS: 373-422); a VH CDR2 (SEQ ID NOS: 132-220, 497-514), a VH CDR3 (SEQ ID NOS: 57, 49, 221-296, 515-530, 488-493, 1795, 1796), a VL CDR1 (SEQ ID NOS: 297-372, 531-546) and a VL CDR3 (SEQ ID NOS: 423-479, 558-569); a VH CDR2 (SEQ ID NOS: 132-220, 497-514), a VH CDR3 (SEQ ID NOS: 57, 49, 221-296, 515-530, 488-493, 1795, 1796), a VL CDR2 (SEQ ID NOS: 373-422) and a VL CDR3 (SEQ ID NOS: 423-479, 558-569); a VH CDR1 (SEQ ID NOS: 57, 49, 221-296, 515-530, 488-493, 1795, 1796), a VH CDR2 (SEQ ID NOS: 132-220, 497-514), a VH CDR3 (SEQ ID NOS: 57, 49, 221-296, 515-530, 488-493, 1795, 1796), a VL CDR1 (SEQ ID NOS: 297-372, 531-546) and a VL CDR2 (SEQ ID NOS: 373-422); a VH CDR1 (SEQ ID NOS: 57, 49, 221-296, 515-530, 488-493, 1795, 1796), a VH CDR2 (SEQ ID NOS: 132-220, 497-514), a VH CDR3 (SEQ ID NOS: 57, 49, 221-296, 515-530, 488-493, 1795, 1796), a VL CDR1 (SEQ ID NOS: 297-372, 531-546) and a VL CDR3 (SEQ ID NOS: 423-479, 558-569); a VH CDR1 (SEQ ID NOS: 57, 49, 221-296, 515-530, 488-493, 1795, 1796), a VH CDR2 (SEQ ID NOS: 132-220, 497-514), a VH CDR3 (SEQ ID NOS: 57, 49, 221-296, 515-530, 488-493, 1795, 1796), a VL CDR2 (SEQ ID NOS: 373-422) and a VL CDR3 (SEQ ID NOS: 423-479, 558-569); a VH CDR1 (SEQ ID NOS: 57, 49, 221-296, 515-530, 488-493, 1795, 1796), a VH CDR2 (SEQ ID NOS: 132-220, 497-514), a VL CDR1 (SEQ ID NOS: 297-372, 531-546), a VL CDR2 (SEQ ID NOS: 373-422), and a VL CDR3 (SEQ ID NOS: 423-479, 558-569); a VH CDR1 (SEQ ID NOS: 57, 49, 221-296, 515-530, 488-493, 1795, 1796), a VH CDR3 (SEQ ID NOS: 57, 49, 221-296, 515-530, 488-493, 1795, 1796), a VL CDR1 (SEQ ID NOS: 297-372, 531-546), a VL CDR2 (SEQ ID NOS: 373-422), and a VL CDR3 (SEQ ID NOS: 423-479, 558-569); a VH CDR2 (SEQ ID NOS: 132-220, 497-514), a VH CDR3 (SEQ ID NOS: 57, 49, 221-296, 515-530, 488-493, 1795, 1796), a VL CDR1 (SEQ ID NOS: 297-372, 531-546), a VL CDR2 (SEQ ID NOS: 373-422), and a VL CDR3 (SEQ ID NOS: 423-479, 558-569); or any combination thereof of the VH CDRs (SEQ ID NOS: 41-296) and VL CDRs (SEQ ID NOS: 297-477) listed in Tables 1-24.

[0284] In certain embodiments, an antibody or fragment thereof described herein comprises a humanized framework region (FR) sequence. In certain embodiments, an antibody or fragment thereof described herein comprises a VH region comprising a VH FR1, a VH FR2, a VH FR3 and a VH FR4 amino acid sequence depicted in Table 25; and/or (b) a VL region comprising a VL FR1, a VL FR2, a VL FR3 and a VL FR4 amino acid sequence depicted in Table 25.

TABLE 25
Exemplary Framework Sequences for Humanized Anti-GFRAL Antibodies

| | | |
|---|---|---|
| | Clones | SEQ ID |
| VH | Humanized | NO: |

VH Framework 1 (FR1)

| | | |
|---|---|---|
| QVQLQESGPGLVKPSETLSLTCTVS | 1C1 | [symbol] 70 |
| QMQLQESGPGLVKPSETLSLTCTVS | 1C1 | [symbol] 71 |
| [sequence omitted] | 3P10, 5F12, | [symbol] 72 |
| | 25M22, 17J16 | |
| QIQLVQSGAEVKKPGSSVKVSCKAS | 3P10 | [symbol] 73 |
| QVQLVQSGAEVKKPGATVKISCKVS | 3P10 | [symbol] 74 |
| QIQLVQSGAEVKKPGATVKISCKVS | 3P10 | [symbol] 75 |
| QVQLVQSGAEVVKPGSSVKVSCKAS | 5F12 | [symbol] 76 |
| [sequence omitted] | 5F12 | [symbol] 77 |
| EVQLVQSGAEVKKPGESLKISCKGS | 25M22 | [symbol] 78 |

VH Framework 2 (FR2)

| | | |
|---|---|---|
| WIRQPPGKGLEWIG | 1C1 | 79 |
| WIRQPPGKGLEWLG | 1C1 | [symbol] 80 |
| WVRQAPGQGLEWMG | 3P10, 5F12, | [symbol] 81 |
| | 25M22, 17J16 | |
| WVRQAPGKGLEWMG | 3P10 | [symbol] 82 |
| WVRQAPGQALEWMG | 3P10 | [symbol] 83 |
| WVRQAPGQGLKWMG | 3P10 | [symbol] 84 |
| WVRQAPGKALEWMG | 3P10 | [symbol] 85 |
| WVRQAPGKGLKWMG | 3P10 | [symbol] 86 |
| WVRQAPGQALKWMG | 3P10 | [symbol] 87 |
| WVRQAPGKALKWMG | 3P10 | [symbol] 88 |
| WVKQAPGQGLEWIG | 5F12, 17J16 | [symbol] 89 |
| WVRQAPGQGLEWIG | 5F12, 25M22, | [symbol] 90 |
| | 17J16 | |
| WVRQAPGQGLEWIA | 5F12 | [symbol] 91 |
| WVKQAPGQGLEWIG | 5F12, 17J16 | [symbol] 92 |
| WVKQAPGQGLEWIA | 5F12 | [symbol] 93 |
| WVRQAPGQGLEWIA | 5F12 | [symbol] 94 |
| WVKQAPGQGLEWIA | 5F12 | [symbol] 95 |
| WMQQAPGKGLEWIG | 3P10 | [symbol] 96 |
| WVRQAPGQRLEWMG | 5F12 | [symbol] 97 |
| WVRQAPGQRLEWIG | 5F12 | [symbol] 98 |
| WVRQAPGQRLEWMA | 5F12 | [symbol] 99 |
| WVRQAPGQRLEWIA | 5F12 | [symbol] 00 |
| WVRQMPGKGLEWMG | 25M22 | [symbol] 01 |
| WVRQMPGKGLEWIG | 25M22 | [symbol] 02 |

VH Framework 3 (FR3)

| | | |
|---|---|---|
| RVTISVDTSKNQFSLKLSSVTAADTAVYYCAR | 1C1 | [symbol] 03 |
| RLTISVDTSKNQFSLKLSSVTAADTAVYYCAR | 1C1 | [symbol] 04 |
| RVTISKDTSKNQFSLKLSSVTAADTAVYYCAR | 1C1 | [symbol] 05 |
| RVTISVDNSKNQFSLKLSSVTAADTAVYYCAR | 1C1 | [symbol] 06 |
| RVTISVDTSKSQFSLKLSSVTAADTAVYYCAR | 1C1 | [symbol] 07 |
| RVTISVDTSKNQVSLKLSSVTAADTAVYYCAR | 1C1 | [symbol] 08 |
| RVTISVDTSKNQFSFKLSSVTAADTAVYYCAR | 1C1 | [symbol] 09 |
| RVTISVDTSKNQFSLKMSSVTAADTAVYYCAR | 1C1 | [symbol] 10 |
| RVTISVDTSKNQFSLKLSSLTAADTAVYYCAR | 1C1 | [symbol] 11 |
| RVTISVDTSKNQFSLKLSSVQAADTAVYYCAR | 1C1 | [symbol] 12 |
| RVTISVDTSKNQFSLKLSSVTAQDTAVYYCAR | 1C1 | [symbol] 13 |
| RLTISKDTSKNQFSLKLSSVTAADTAVYYCAR | 1C1 | [symbol] 14 |
| RLTISVDNSKNQFSLKLSSVTAADTAVYYCAR | 1C1 | [symbol] 15 |
| RLTISVDTSKSQFSLKLSSVTAADTAVYYCAR | 1C1 | [symbol] 16 |
| RLTISVDTSKNQVSLKLSSVTAADTAVYYCAR | 1C1 | [symbol] 17 |
| RLTISVDTSKNQFSFKLSSVTAADTAVYYCAR | 1C1 | [symbol] 18 |
| RLTISVDTSKNQFSLKMSSVTAADTAVYYCAR | 1C1 | [symbol] 19 |
| RLTISVDTSKNQFSLKLSSLTAADTAVYYCAR | 1C1 | [symbol] 20 |
| RLTISVDTSKNQFSLKLSSVQAADTAVYYCAR | 1C1 | [symbol] 21 |
| RLTISVDTSKNQFSLKLSSVTAQDTAVYYCAR | 1C1 | [symbol] 22 |
| RVTISKDNSKNQFSLKLSSVTAADTAVYYCAR | 1C1 | [symbol] 23 |
| RVTISKDTSKSQFSLKLSSVTAADTAVYYCAR | 1C1 | [symbol] 24 |
| RVTISKDTSKNQVSLKLSSVTAADTAVYYCAR | 1C1 | [symbol] 25 |
| RVTISKDTSKNQFSFKLSSVTAADTAVYYCAR | 1C1 | [symbol] 26 |
| RVTISKDTSKNQFSLKMSSVTAADTAVYYCAR | 1C1 | [symbol] 27 |
| RVTISKDTSKNQFSLKLSSLTAADTAVYYCAR | 1C1 | [symbol] 28 |
| RVTISKDTSKNQFSLKLSSVQAADTAVYYCAR | 1C1 | [symbol] 29 |
| RVTISKDTSKNQFSLKLSSVTAQDTAVYYCAR | 1C1 | [symbol] 30 |
| RVTISVDNSKSQFSLKLSSVTAADTAVYYCAR | 1C1 | [symbol] 31 |
| RVTISVDNSKNQVSLKLSSVTAADTAVYYCAR | 1C1 | [symbol] 32 |
| RVTISVDNSKNQFSFKLSSVTAADTAVYYCAR | 1C1 | [symbol] 33 |
| RVTISVDNSKNQFSLKMSSVTAADTAVYYCAR | 1C1 | [symbol] 34 |
| RVTISVDNSKNQFSLKLSSLTAADTAVYYCAR | 1C1 | [symbol] 35 |
| RVTISVDNSKNQFSLKLSSVQAADTAVYYCAR | 1C1 | [symbol] 36 |
| RVTISVDNSKNQFSLKLSSVTAQDTAVYYCAR | 1C1 | [symbol] 37 |
| RVTISVDTSKSQVSLKLSSVTAADTAVYYCAR | 1C1 | [symbol] 38 |
| RVTISVDTSKSQFSFKLSSVTAADTAVYYCAR | 1C1 | [symbol] 39 |
| RVTISVDTSKSQFSLKMSSVTAADTAVYYCAR | 1C1 | [symbol] 40 |
| RVTISVDTSKSQFSLKLSSLTAADTAVYYCAR | 1C1 | [symbol] 41 |
| RVTISVDTSKSQFSLKLSSVQAADTAVYYCAR | 1C1 | [symbol] 42 |
| RVTISVDTSKSQFSLKLSSVTAQDTAVYYCAR | 1C1 | [symbol] 43 |
| RVTISVDTSKNQVSFKLSSVTAADTAVYYCAR | 1C1 | [symbol] 44 |
| RVTISVDTSKNQVSLKMSSVTAADTAVYYCAR | 1C1 | [symbol] 45 |
| RVTISVDTSKNQVSLKLSSLTAADTAVYYCAR | 1C1 | [symbol] 46 |
| RVTISVDTSKNQVSLKLSSVQAADTAVYYCAR | 1C1 | [symbol] 47 |
| RVTISVDTSKNQVSLKLSSVTAQDTAVYYCAR | 1C1 | [symbol] 48 |
| RVTISVDTSKNQFSFKMSSVTAADTAVYYCAR | 1C1 | [symbol] 49 |
| RVTISVDTSKNQFSFKLSSLTAADTAVYYCAR | 1C1 | [symbol] 50 |
| RVTISVDTSKNQFSFKLSSVQAADTAVYYCAR | 1C1 | [symbol] 51 |
| RVTISVDTSKNQFSFKLSSVTAQDTAVYYCAR | 1C1 | [symbol] 52 |
| RVTISVDTSKNQFSLKMSSLTAADTAVYYCAR | 1C1 | [symbol] 53 |
| RVTISVDTSKNQFSLKMSSVQAADTAVYYCAR | 1C1 | [symbol] 54 |
| RVTISVDTSKNQFSLKMSSVTAQDTAVYYCAR | 1C1 | [symbol] 55 |
| RVTISVDTSKNQFSLKLSSLQAADTAVYYCAR | 1C1 | [symbol] 56 |
| RVTISVDTSKNQFSLKLSSLTAQDTAVYYCAR | 1C1 | [symbol] 57 |
| RVTISVDTSKNQFSLKLSSVQAQDTAVYYCAR | 1C1 | [symbol] 58 |
| RLTISKDNSKNQFSLKLSSVTAADTAVYYCAR | 1C1 | [symbol] 59 |
| RLTISKDTSKSQFSLKLSSVTAADTAVYYCAR | 1C1 | [symbol] 60 |
| RLTISKDTSKNQVSLKLSSVTAADTAVYYCAR | 1C1 | [symbol] 61 |
| RLTISKDTSKNQFSFKLSSVTAADTAVYYCAR | 1C1 | [symbol] 62 |
| RLTISKDTSKNQFSLKMSSVTAADTAVYYCAR | 1C1 | [symbol] 63 |
| RLTISKDTSKNQFSLKLSSLTAADTAVYYCAR | 1C1 | [symbol] 64 |
| RLTISKDTSKNQFSLKLSSVQAADTAVYYCAR | 1C1 | [symbol] 65 |
| RLTISKDTSKNQFSLKLSSVTAQDTAVYYCAR | 1C1 | [symbol] 66 |
| RLTISVDNSKSQFSLKLSSVTAADTAVYYCAR | 1C1 | [symbol] 67 |
| RLTISVDNSKNQVSLKLSSVTAADTAVYYCAR | 1C1 | [symbol] 68 |
| RLTISVDNSKNQFSFKLSSVTAADTAVYYCAR | 1C1 | [symbol] 69 |
| RLTISVDNSKNQFSLKMSSVTAADTAVYYCAR | 1C1 | [symbol] 70 |
| RLTISVDNSKNQFSLKLSSLTAADTAVYYCAR | 1C1 | [symbol] 71 |
| RLTISVDNSKNQFSLKLSSVQAADTAVYYCAR | 1C1 | [symbol] 72 |
| RLTISVDNSKNQFSLKLSSVTAQDTAVYYCAR | 1C1 | [symbol] 73 |
| RLTISVDTSKSQVSLKLSSVTAADTAVYYCAR | 1C1 | [symbol] 74 |
| RLTISVDTSKSQFSFKLSSVTAADTAVYYCAR | 1C1 | [symbol] 75 |
| RLTISVDTSKSQFSLKMSSVTAADTAVYYCAR | 1C1 | [symbol] 76 |
| RLTISVDTSKSQFSLKLSSLTAADTAVYYCAR | 1C1 | [symbol] 77 |
| RLTISVDTSKSQFSLKLSSVQAADTAVYYCAR | 1C1 | [symbol] 78 |
| RLTISVDTSKSQFSLKLSSVTAQDTAVYYCAR | 1C1 | [symbol] 79 |
| RLTISVDTSKNQVSFKLSSVTAADTAVYYCAR | 1C1 | [symbol] 80 |
| RLTISVDTSKNQVSLKMSSVTAADTAVYYCAR | 1C1 | [symbol] 81 |
| RLTISVDTSKNQVSLKLSSLTAADTAVYYCAR | 1C1 | [symbol] 82 |
| RLTISVDTSKNQVSLKLSSVQAADTAVYYCAR | 1C1 | [symbol] 83 |
| RLTISVDTSKNQVSLKLSSVTAQDTAVYYCAR | 1C1 | [symbol] 84 |
| RLTISVDTSKNQFSFKMSSVTAADTAVYYCAR | 1C1 | [symbol] 85 |
| RLTISVDTSKNQFSFKLSSLTAADTAVYYCAR | 1C1 | [symbol] 86 |
| RLTISVDTSKNQFSFKLSSVQAADTAVYYCAR | 1C1 | [symbol] 87 |
| RLTISVDTSKNQFSFKLSSVTAQDTAVYYCAR | 1C1 | [symbol] 88 |
| RLTISVDTSKNQFSLKMSSLTAADTAVYYCAR | 1C1 | [symbol] 89 |
| RLTISVDTSKNQFSLKMSSVQAADTAVYYCAR | 1C1 | [symbol] 90 |
| RLTISVDTSKNQFSLKMSSVTAQDTAVYYCAR | 1C1 | [symbol] 91 |
| RLTISVDTSKNQFSLKLSSLQAADTAVYYCAR | 1C1 | [symbol] 92 |
| RLTISVDTSKNQFSLKLSSLTAQDTAVYYCAR | 1C1 | [symbol] 93 |
| RLTISVDTSKNQFSLKLSSVQAQDTAVYYCAR | 1C1 | [symbol] 94 |
| RVTISKDNSKSQFSLKLSSVTAADTAVYYCAR | 1C1 | [symbol] 95 |
| RVTISKDNSKNQVSLKLSSVTAADTAVYYCAR | 1C1 | [symbol] 96 |
| RVTISKDNSKNQFSFKLSSVTAADTAVYYCAR | 1C1 | [symbol] 97 |
| RVTISKDNSKNQFSLKMSSVTAADTAVYYCAR | 1C1 | [symbol] 98 |
| RVTISKDNSKNQFSLKLSSLTAADTAVYYCAR | 1C1 | [symbol] 99 |
| RVTISKDNSKNQFSLKLSSVQAADTAVYYCAR | 1C1 | [symbol] 00 |
| RVTISKDNSKNQFSLKLSSVTAQDTAVYYCAR | 1C1 | [symbol] 01 |
| RVTISKDTSKSQVSLKLSSVTAADTAVYYCAR | 1C1 | [symbol] 02 |
| RVTISKDTSKSQFSFKLSSVTAADTAVYYCAR | 1C1 | [symbol] 03 |
| RVTISKDTSKSQFSLKMSSVTAADTAVYYCAR | 1C1 | [symbol] 04 |
| RVTISKDTSKSQFSLKLSSLTAADTAVYYCAR | 1C1 | [symbol] 05 |
| RVTISKDTSKSQFSLKLSSVQAADTAVYYCAR | 1C1 | [symbol] 06 |
| RVTISKDTSKSQFSLKLSSVTAQDTAVYYCAR | 1C1 | [symbol] 07 |
| RVTISKDTSKNQVSFKLSSVTAADTAVYYCAR | 1C1 | [symbol] 08 |
| RVTISKDTSKNQVSLKMSSVTAADTAVYYCAR | 1C1 | [symbol] 09 |
| RVTISKDTSKNQVSLKLSSLTAADTAVYYCAR | 1C1 | [symbol] 10 |
| RVTISKDTSKNQVSLKLSSVQAADTAVYYCAR | 1C1 | [symbol] 11 |
| RVTISKDTSKNQVSLKLSSVTAQDTAVYYCAR | 1C1 | [symbol] 12 |
| RVTISKDTSKNQFSFKMSSVTAADTAVYYCAR | 1C1 | [symbol] 13 |
| RVTISKDTSKNQFSFKLSSLTAADTAVYYCAR | 1C1 | [symbol] 14 |
| RVTISKDTSKNQFSFKLSSVQAADTAVYYCAR | 1C1 | [symbol] 15 |
| RVTISKDTSKNQFSFKLSSVTAQDTAVYYCAR | 1C1 | [symbol] 16 |
| RVTISKDTSKNQFSLKMSSLTAADTAVYYCAR | 1C1 | [symbol] 17 |
| RVTISKDTSKNQFSLKMSSVQAADTAVYYCAR | 1C1 | [symbol] 18 |
| RVTISKDTSKNQFSLKMSSVTAQDTAVYYCAR | 1C1 | [symbol] 19 |
| RVTISKDTSKNQFSLKLSSLQAADTAVYYCAR | 1C1 | [symbol] 20 |
| RVTISKDTSKNQFSLKLSSLTAQDTAVYYCAR | 1C1 | [symbol] 21 |
| RVTISKDTSKNQFSLKLSSVQAQDTAVYYCAR | 1C1 | [symbol] 22 |
| RVTISVDNSKSQVSLKLSSVTAADTAVYYCAR | 1C1 | [symbol] 23 |
| RVTISVDNSKSQFSFKLSSVTAADTAVYYCAR | 1C1 | [symbol] 24 |
| RVTISVDNSKSQFSLKMSSVTAADTAVYYCAR | 1C1 | [symbol] 25 |
| RVTISVDNSKSQFSLKLSSLTAADTAVYYCAR | 1C1 | [symbol] 26 |
| RVTISVDNSKSQFSLKLSSVQAADTAVYYCAR | 1C1 | [symbol] 27 |
| RVTISVDNSKSQFSLKLSSVTAQDTAVYYCAR | 1C1 | [symbol] 28 |
| RVTISVDNSKNQVSFKLSSVTAADTAVYYCAR | 1C1 | [symbol] 29 |
| RVTISVDNSKNQVSLKMSSVTAADTAVYYCAR | 1C1 | [symbol] 30 |
| RVTISVDNSKNQVSLKLSSLTAADTAVYYCAR | 1C1 | [symbol] 31 |
| RVTISVDNSKNQVSLKLSSVQAADTAVYYCAR | 1C1 | [symbol] 32 |
| RVTISVDNSKNQVSLKLSSVTAQDTAVYYCAR | 1C1 | [symbol] 33 |
| RVTISVDNSKNQFSFKMSSVTAADTAVYYCAR | 1C1 | [symbol] 34 |
| RVTISVDNSKNQFSFKLSSLTAADTAVYYCAR | 1C1 | [symbol] 35 |
| RVTISVDNSKNQFSFKLSSVQAADTAVYYCAR | 1C1 | [symbol] 36 |
| RVTISVDNSKNQFSFKLSSVTAQDTAVYYCAR | 1C1 | [symbol] 37 |
| RVTISVDNSKNQFSLKMSSLTAADTAVYYCAR | 1C1 | [symbol] 38 |
| RVTISVDNSKNQFSLKMSSVQAADTAVYYCAR | 1C1 | [symbol] 39 |
| RVTISVDNSKNQFSLKMSSVTAQDTAVYYCAR | 1C1 | [symbol] 40 |
| RVTISVDNSKNQFSLKLSSLQAADTAVYYCAR | 1C1 | [symbol] 41 |
| RVTISVDNSKNQFSLKLSSLTAQDTAVYYCAR | 1C1 | [symbol] 42 |
| RVTISVDNSKNQFSLKLSSVQAQDTAVYYCAR | 1C1 | [symbol] 43 |
| RVTISVDTSKSQVSFKLSSVTAADTAVYYCAR | 1C1 | [symbol] 44 |
| RVTISVDTSKSQVSLKMSSVTAADTAVYYCAR | 1C1 | [symbol] 45 |
| RVTISVDTSKSQVSLKLSSLTAADTAVYYCAR | 1C1 | [symbol] 46 |
| RVTISVDTSKSQVSLKLSSVQAADTAVYYCAR | 1C1 | [symbol] 47 |
| RVTISVDTSKSQVSLKLSSVTAQDTAVYYCAR | 1C1 | [symbol] 48 |
| RVTISVDTSKSQFSFKMSSVTAADTAVYYCAR | 1C1 | [symbol] 49 |
| RVTISVDTSKSQFSFKLSSLTAADTAVYYCAR | 1C1 | [symbol] 50 |
| RVTISVDTSKSQFSFKLSSVQAADTAVYYCAR | 1C1 | [symbol] 51 |
| RVTISVDTSKSQFSFKLSSVTAQDTAVYYCAR | 1C1 | [symbol] 52 |
| RVTISVDTSKSQFSLKMSSLTAADTAVYYCAR | 1C1 | [symbol] 53 |
| RVTISVDTSKSQFSLKMSSVQAADTAVYYCAR | 1C1 | [symbol] 54 |
| RVTISVDTSKSQFSLKMSSVTAQDTAVYYCAR | 1C1 | [symbol] 55 |
| RVTISVDTSKSQFSLKLSSLQAADTAVYYCAR | 1C1 | [symbol] 56 |
| RVTISVDTSKSQFSLKLSSLTAQDTAVYYCAR | 1C1 | [symbol] 57 |
| RVTISVDTSKSQFSLKLSSVQAQDTAVYYCAR | 1C1 | [symbol] 58 |
| RVTISVDTSKNQVSFKMSSVTAADTAVYYCAR | 1C1 | [symbol] 59 |
| RVTISVDTSKNQVSFKLSSLTAADTAVYYCAR | 1C1 | [symbol] 60 |
| RVTISVDTSKNQVSFKLSSVQAADTAVYYCAR | 1C1 | [symbol] 61 |
| RVTISVDTSKNQVSFKLSSVTAQDTAVYYCAR | 1C1 | [symbol] 62 |
| RVTISVDTSKNQVSLKMSSLTAADTAVYYCAR | 1C1 | [symbol] 63 |
| RVTISVDTSKNQVSLKMSSVQAADTAVYYCAR | 1C1 | [symbol] 64 |
| RVTISVDTSKNQVSLKMSSVTAQDTAVYYCAR | 1C1 | [symbol] 65 |
| RVTISVDTSKNQVSLKLSSLQAADTAVYYCAR | 1C1 | [symbol] 66 |
| RVTISVDTSKNQVSLKLSSLTAQDTAVYYCAR | 1C1 | [symbol] 67 |
| RVTISVDTSKNQVSLKLSSVQAQDTAVYYCAR | 1C1 | [symbol] 68 |
| RVTISVDTSKNQFSFKMSSLTAADTAVYYCAR | 1C1 | [symbol] 69 |
| RVTISVDTSKNQFSFKMSSVQAADTAVYYCAR | 1C1 | [symbol] 70 |
| RVTISVDTSKNQFSFKMSSVTAQDTAVYYCAR | 1C1 | [symbol] 71 |
| RVTISVDTSKNQFSFKLSSLQAADTAVYYCAR | 1C1 | [symbol] 72 |
| RVTISVDTSKNQFSFKLSSLTAQDTAVYYCAR | 1C1 | [symbol] 73 |
| RVTISVDTSKNQFSFKLSSVQAQDTAVYYCAR | 1C1 | [symbol] 74 |
| RVTISVDTSKNQFSLKMSSLQAADTAVYYCAR | 1C1 | [symbol] 75 |
| RVTISVDTSKNQFSLKMSSLTAQDTAVYYCAR | 1C1 | [symbol] 76 |
| RVTISVDTSKNQFSLKMSSVQAQDTAVYYCAR | 1C1 | [symbol] 77 |
| RVTISVDTSKNQFSLKLSSLQAQDTAVYYCAR | 1C1 | [symbol] 78 |
| RLTISKDNSKSQFSLKLSSVTAADTAVYYCAR | 1C1 | [symbol] 79 |
| RLTISKDNSKNQVSLKLSSVTAADTAVYYCAR | 1C1 | [symbol] 80 |
| RLTISKDNSKNQFSFKLSSVTAADTAVYYCAR | 1C1 | [symbol] 81 |
| RLTISKDNSKNQFSLKMSSVTAADTAVYYCAR | 1C1 | [symbol] 82 |
| RLTISKDNSKNQFSLKLSSLTAADTAVYYCAR | 1C1 | [symbol] 83 |
| RLTISKDNSKNQFSLKLSSVQAADTAVYYCAR | 1C1 | [symbol] 84 |
| RLTISKDNSKNQFSLKLSSVTAQDTAVYYCAR | 1C1 | [symbol] 85 |
| RLTISKDTSKSQVSLKLSSVTAADTAVYYCAR | 1C1 | [symbol] 86 |
| RLTISKDTSKSQFSFKLSSVTAADTAVYYCAR | 1C1 | [symbol] 87 |
| RLTISKDTSKSQFSLKMSSVTAADTAVYYCAR | 1C1 | [symbol] 88 |
| RLTISKDTSKSQFSLKLSSLTAADTAVYYCAR | 1C1 | [symbol] 89 |
| RLTISKDTSKSQFSLKLSSVQAADTAVYYCAR | 1C1 | [symbol] 90 |
| RLTISKDTSKSQFSLKLSSVTAQDTAVYYCAR | 1C1 | [symbol] 91 |
| RLTISKDTSKNQVSFKLSSVTAADTAVYYCAR | 1C1 | [symbol] 92 |
| RLTISKDTSKNQVSLKMSSVTAADTAVYYCAR | 1C1 | [symbol] 93 |
| RLTISKDTSKNQVSLKLSSLTAADTAVYYCAR | 1C1 | [symbol] 94 |
| RLTISKDTSKNQVSLKLSSVQAADTAVYYCAR | 1C1 | [symbol] 95 |
| RLTISKDTSKNQVSLKLSSVTAQDTAVYYCAR | 1C1 | [symbol] 96 |
| RLTISKDTSKNQFSFKMSSVTAADTAVYYCAR | 1C1 | [symbol] 97 |
| RLTISKDTSKNQFSFKLSSLTAADTAVYYCAR | 1C1 | [symbol] 98 |
| RLTISKDTSKNQFSFKLSSVQAADTAVYYCAR | 1C1 | [symbol] 99 |
| RLTISKDTSKNQFSFKLSSVTAQDTAVYYCAR | 1C1 | [symbol] 00 |
| RLTISKDTSKNQFSLKMSSLTAADTAVYYCAR | 1C1 | [symbol] 01 |
| RLTISKDTSKNQFSLKMSSVQAADTAVYYCAR | 1C1 | [symbol] 02 |
| RLTISKDTSKNQFSLKMSSVTAQDTAVYYCAR | 1C1 | [symbol] 03 |
| RLTISKDTSKNQFSLKLSSLQAADTAVYYCAR | 1C1 | [symbol] 04 |
| RLTISKDTSKNQFSLKLSSLTAQDTAVYYCAR | 1C1 | [symbol] 05 |
| RLTISKDTSKNQFSLKLSSVQAQDTAVYYCAR | 1C1 | [symbol] 06 |
| RLTISVDNSKSQVSLKLSSVTAADTAVYYCAR | 1C1 | [symbol] 07 |
| RLTISVDNSKSQFSFKLSSVTAADTAVYYCAR | 1C1 | [symbol] 08 |
| RLTISVDNSKSQFSLKMSSVTAADTAVYYCAR | 1C1 | [symbol] 09 |
| RLTISVDNSKSQFSLKLSSLTAADTAVYYCAR | 1C1 | [symbol] 10 |
| RLTISVDNSKSQFSLKLSSVQAADTAVYYCAR | 1C1 | [symbol] 11 |
| RLTISVDNSKSQFSLKLSSVTAQDTAVYYCAR | 1C1 | [symbol] 12 |
| RLTISVDNSKNQVSFKLSSVTAADTAVYYCAR | 1C1 | [symbol] 13 |
| RLTISVDNSKNQVSLKMSSVTAADTAVYYCAR | 1C1 | [symbol] 14 |
| RLTISVDNSKNQVSLKLSSLTAADTAVYYCAR | 1C1 | [symbol] 15 |
| RLTISVDNSKNQVSLKLSSVQAADTAVYYCAR | 1C1 | [symbol] 16 |
| RLTISVDNSKNQVSLKLSSVTAQDTAVYYCAR | 1C1 | [symbol] 17 |
| RLTISVDNSKNQFSFKMSSVTAADTAVYYCAR | 1C1 | [symbol] 18 |
| RLTISVDNSKNQFSFKLSSLTAADTAVYYCAR | 1C1 | [symbol] 19 |
| RLTISVDNSKNQFSFKLSSVQAADTAVYYCAR | 1C1 | [symbol] 20 |
| RLTISVDNSKNQFSFKLSSVTAQDTAVYYCAR | 1C1 | [symbol] 21 |
| RLTISVDNSKNQFSLKMSSLTAADTAVYYCAR | 1C1 | [symbol] 22 |
| RLTISVDNSKNQFSLKMSSVQAADTAVYYCAR | 1C1 | [symbol] 23 |
| RLTISVDNSKNQFSLKMSSVTAQDTAVYYCAR | 1C1 | [symbol] 24 |
| RLTISVDNSKNQFSLKLSSLQAADTAVYYCAR | 1C1 | [symbol] 25 |
| RLTISVDNSKNQFSLKLSSLTAQDTAVYYCAR | 1C1 | [symbol] 26 |
| RLTISVDNSKNQFSLKLSSVQAQDTAVYYCAR | 1C1 | [symbol] 27 |
| RLTISVDTSKSQVSFKLSSVTAADTAVYYCAR | 1C1 | [symbol] 28 |
| RLTISVDTSKSQVSLKMSSVTAADTAVYYCAR | 1C1 | [symbol] 29 |
| RLTISVDTSKSQVSLKLSSLTAADTAVYYCAR | 1C1 | [symbol] 30 |
| RLTISVDTSKSQVSLKLSSVQAADTAVYYCAR | 1C1 | [symbol] 31 |
| RLTISVDTSKSQVSLKLSSVTAQDTAVYYCAR | 1C1 | [symbol] 32 |
| RLTISVDTSKSQFSFKMSSVTAADTAVYYCAR | 1C1 | [symbol] 33 |
| RLTISVDTSKSQFSFKLSSLTAADTAVYYCAR | 1C1 | [symbol] 34 |
| RLTISVDTSKSQFSFKLSSVQAADTAVYYCAR | 1C1 | [symbol] 35 |
| RLTISVDTSKSQFSFKLSSVTAQDTAVYYCAR | 1C1 | [symbol] 36 |
| RLTISVDTSKSQFSLKMSSLTAADTAVYYCAR | 1C1 | [symbol] 37 |
| RLTISVDTSKSQFSLKMSSVQAADTAVYYCAR | 1C1 | [symbol] 38 |
| RLTISVDTSKSQFSLKMSSVTAQDTAVYYCAR | 1C1 | [symbol] 39 |
| RLTISVDTSKSQFSLKLSSLQAADTAVYYCAR | 1C1 | [symbol] 40 |
| RLTISVDTSKSQFSLKLSSLTAQDTAVYYCAR | 1C1 | [symbol] 41 |
| RLTISVDTSKSQFSLKLSSVQAQDTAVYYCAR | 1C1 | [symbol] 42 |
| RLTISVDTSKNQVSFKMSSVTAADTAVYYCAR | 1C1 | [symbol] 43 |
| RLTISVDTSKNQVSFKLSSLTAADTAVYYCAR | 1C1 | [symbol] 44 |
| RLTISVDTSKNQVSFKLSSVQAADTAVYYCAR | 1C1 | [symbol] 45 |
| RLTISVDTSKNQVSFKLSSVTAQDTAVYYCAR | 1C1 | [symbol] 46 |
| RLTISVDTSKNQVSLKMSSLTAADTAVYYCAR | 1C1 | [symbol] 47 |
| RLTISVDTSKNQVSLKMSSVQAADTAVYYCAR | 1C1 | [symbol] 48 |
| RLTISVDTSKNQVSLKMSSVTAQDTAVYYCAR | 1C1 | [symbol] 49 |
| RLTISVDTSKNQVSLKLSSLQAADTAVYYCAR | 1C1 | [symbol] 50 |
| RLTISVDTSKNQVSLKLSSLTAQDTAVYYCAR | 1C1 | [symbol] 51 |
| RLTISVDTSKNQVSLKLSSVQAQDTAVYYCAR | 1C1 | [symbol] 52 |
| RLTISVDTSKNQFSFKMSSLTAADTAVYYCAR | 1C1 | [symbol] 53 |
| RLTISVDTSKNQFSFKMSSVQAADTAVYYCAR | 1C1 | [symbol] 54 |
| RLTISVDTSKNQFSFKMSSVTAQDTAVYYCAR | 1C1 | [symbol] 55 |
| RLTISVDTSKNQFSFKLSSLQAADTAVYYCAR | 1C1 | [symbol] 56 |
| RLTISVDTSKNQFSFKLSSLTAQDTAVYYCAR | 1C1 | [symbol] 57 |
| RLTISVDTSKNQFSFKLSSVQAQDTAVYYCAR | 1C1 | [symbol] 58 |
| RLTISVDTSKNQFSLKMSSLQAADTAVYYCAR | 1C1 | [symbol] 59 |
| RLTISVDTSKNQFSLKMSSLTAQDTAVYYCAR | 1C1 | [symbol] 60 |
| RLTISVDTSKNQFSLKMSSVQAQDTAVYYCAR | 1C1 | [symbol] 61 |
| RLTISVDTSKNQFSLKLSSLQAQDTAVYYCAR | 1C1 | [symbol] 62 |
| RVTISKDNSKSQVSLKLSSVTAADTAVYYCAR | 1C1 | [symbol] 63 |
| RVTISKDNSKSQFSFKLSSVTAADTAVYYCAR | 1C1 | [symbol] 64 |
| RVTISKDNSKSQFSLKMSSVTAADTAVYYCAR | 1C1 | [symbol] 65 |
| RVTISKDNSKSQFSLKLSSLTAADTAVYYCAR | 1C1 | [symbol] 66 |
| RVTISKDNSKSQFSLKLSSVQAADTAVYYCAR | 1C1 | [symbol] 67 |
| RVTISKDNSKSQFSLKLSSVTAQDTAVYYCAR | 1C1 | [symbol] 68 |
| RVTISKDNSKNQVSFKLSSVTAADTAVYYCAR | 1C1 | [symbol] 69 |
| RVTISKDNSKNQVSLKMSSVTAADTAVYYCAR | 1C1 | [symbol] 70 |
| RVTISKDNSKNQVSLKLSSLTAADTAVYYCAR | 1C1 | [symbol] 71 |
| RVTISKDNSKNQVSLKLSSVQAADTAVYYCAR | 1C1 | [symbol] 72 |
| RVTISKDNSKNQVSLKLSSVTAQDTAVYYCAR | 1C1 | [symbol] 73 |
| RVTISKDNSKNQFSFKMSSVTAADTAVYYCAR | 1C1 | [symbol] 74 |
| RVTISKDNSKNQFSFKLSSLTAADTAVYYCAR | 1C1 | [symbol] 75 |
| RVTISKDNSKNQFSFKLSSVQAADTAVYYCAR | 1C1 | [symbol] 76 |
| RVTISKDNSKNQFSFKLSSVTAQDTAVYYCAR | 1C1 | [symbol] 77 |
| RVTISKDNSKNQFSLKMSSLTAADTAVYYCAR | 1C1 | [symbol] 78 |
| RVTISKDNSKNQFSLKMSSVQAADTAVYYCAR | 1C1 | [symbol] 79 |
| RVTISKDNSKNQFSLKMSSVTAQDTAVYYCAR | 1C1 | [symbol] 80 |
| RVTISKDNSKNQFSLKLSSLQAADTAVYYCAR | 1C1 | [symbol] 81 |
| RVTISKDNSKNQFSLKLSSLTAQDTAVYYCAR | 1C1 | [symbol] 82 |
| RVTISKDNSKNQFSLKLSSVQAQDTAVYYCAR | 1C1 | [symbol] 83 |
| RVTISKDTSKSQVSFKLSSVTAADTAVYYCAR | 1C1 | [symbol] 84 |
| RVTISKDTSKSQVSLKMSSVTAADTAVYYCAR | 1C1 | [symbol] 85 |
| RVTISKDTSKSQVSLKLSSLTAADTAVYYCAR | 1C1 | [symbol] 86 |
| RVTISKDTSKSQVSLKLSSVQAADTAVYYCAR | 1C1 | [symbol] 87 |
| RVTISKDTSKSQVSLKLSSVTAQDTAVYYCAR | 1C1 | [symbol] 88 |
| RVTISKDTSKSQFSFKMSSVTAADTAVYYCAR | 1C1 | [symbol] 89 |
| RVTISKDTSKSQFSFKLSSLTAADTAVYYCAR | 1C1 | [symbol] 90 |
| RVTISKDTSKSQFSFKLSSVQAADTAVYYCAR | 1C1 | [symbol] 91 |
| RVTISKDTSKSQFSFKLSSVTAQDTAVYYCAR | 1C1 | [symbol] 92 |
| RVTISKDTSKSQFSLKMSSLTAADTAVYYCAR | 1C1 | [symbol] 93 |
| RVTISKDTSKSQFSLKMSSVQAADTAVYYCAR | 1C1 | [symbol] 94 |
| RVTISKDTSKSQFSLKMSSVTAQDTAVYYCAR | 1C1 | [symbol] 95 |
| RVTISKDTSKSQFSLKLSSLQAADTAVYYCAR | 1C1 | [symbol] 96 |
| RVTISKDTSKSQFSLKLSSLTAQDTAVYYCAR | 1C1 | [symbol] 97 |
| RVTISKDTSKSQFSLKLSSVQAQDTAVYYCAR | 1C1 | [symbol] 98 |
| RVTISKDTSKNQVSFKMSSVTAADTAVYYCAR | 1C1 | [symbol] 99 |
| RVTISKDTSKNQVSFKLSSLTAADTAVYYCAR | 1C1 | [symbol] 00 |
| RVTISKDTSKNQVSFKLSSVQAADTAVYYCAR | 1C1 | [symbol] 01 |
| RVTISKDTSKNQVSFKLSSVTAQDTAVYYCAR | 1C1 | [symbol] 02 |
| RVTISKDTSKNQVSLKMSSLTAADTAVYYCAR | 1C1 | [symbol] 03 |
| RVTISKDTSKNQVSLKMSSVQAADTAVYYCAR | 1C1 | [symbol] 04 |
| RVTISKDTSKNQVSLKMSSVTAQDTAVYYCAR | 1C1 | [symbol] 05 |
| RVTISKDTSKNQVSLKLSSLQAADTAVYYCAR | 1C1 | [symbol] 06 |
| RVTISKDTSKNQVSLKLSSLTAQDTAVYYCAR | 1C1 | [symbol] 07 |
| RVTISKDTSKNQVSLKLSSVQAQDTAVYYCAR | 1C1 | [symbol] 08 |
| RVTISKDTSKNQFSFKMSSLTAADTAVYYCAR | 1C1 | [symbol] 09 |
| RVTISKDTSKNQFSFKMSSVQAADTAVYYCAR | 1C1 | [symbol] 10 |
| RVTISKDTSKNQFSFKMSSVTAQDTAVYYCAR | 1C1 | [symbol] 11 |
| RVTISKDTSKNQFSFKLSSLQAADTAVYYCAR | 1C1 | [symbol] 12 |
| RVTISKDTSKNQFSFKLSSLTAQDTAVYYCAR | 1C1 | [symbol] 13 |
| RVTISKDTSKNQFSFKLSSVQAQDTAVYYCAR | 1C1 | [symbol] 14 |
| RVTISKDTSKNQFSLKMSSLQAADTAVYYCAR | 1C1 | [symbol] 15 |
| RVTISKDTSKNQFSLKMSSLTAQDTAVYYCAR | 1C1 | [symbol] 16 |
| RVTISKDTSKNQFSLKMSSVQAQDTAVYYCAR | 1C1 | [symbol] 17 |
| RVTISKDTSKNQFSLKLSSLQAQDTAVYYCAR | 1C1 | [symbol] 18 |
| RVTISVDNSKSQVSFKLSSVTAADTAVYYCAR | 1C1 | [symbol] 19 |
| RVTISVDNSKSQVSLKMSSVTAADTAVYYCAR | 1C1 | [symbol] 20 |
| RVTISVDNSKSQVSLKLSSLTAADTAVYYCAR | 1C1 | [symbol] 21 |
| RVTISVDNSKSQVSLKLSSVQAADTAVYYCAR | 1C1 | [symbol] 22 |
| RVTISVDNSKSQVSLKLSSVTAQDTAVYYCAR | 1C1 | [symbol] 23 |
| RVTISVDNSKSQFSFKMSSVTAADTAVYYCAR | 1C1 | [symbol] 24 |
| RVTISVDNSKSQFSFKLSSLTAADTAVYYCAR | 1C1 | [symbol] 25 |
| RVTISVDNSKSQFSFKLSSVQAADTAVYYCAR | 1C1 | [symbol] 26 |
| RVTISVDNSKSQFSFKLSSVTAQDTAVYYCAR | 1C1 | [symbol] 27 |
| RVTISVDNSKSQFSLKMSSLTAADTAVYYCAR | 1C1 | [symbol] 28 |
| RVTISVDNSKSQFSLKMSSVQAADTAVYYCAR | 1C1 | [symbol] 29 |
| RVTISVDNSKSQFSLKMSSVTAQDTAVYYCAR | 1C1 | [symbol] 30 |
| RVTISVDNSKSQFSLKLSSLQAADTAVYYCAR | 1C1 | [symbol] 31 |
| RVTISVDNSKSQFSLKLSSLTAQDTAVYYCAR | 1C1 | [symbol] 32 |
| RVTISVDNSKSQFSLKLSSVQAQDTAVYYCAR | 1C1 | [symbol] 33 |
| RVTISVDNSKNQVSFKMSSVTAADTAVYYCAR | 1C1 | [symbol] 34 |
| RVTISVDNSKNQVSFKLSSLTAADTAVYYCAR | 1C1 | [symbol] 35 |
| RVTISVDNSKNQVSFKLSSVQAADTAVYYCAR | 1C1 | [symbol] 36 |
| RVTISVDNSKNQVSFKLSSVTAQDTAVYYCAR | 1C1 | [symbol] 37 |
| RVTISVDNSKNQVSLKMSSLTAADTAVYYCAR | 1C1 | [symbol] 38 |
| RVTISVDNSKNQVSLKMSSVQAADTAVYYCAR | 1C1 | [symbol] 39 |
| RVTISVDNSKNQVSLKMSSVTAQDTAVYYCAR | 1C1 | [symbol] 40 |
| RVTISVDNSKNQVSLKLSSLQAADTAVYYCAR | 1C | [symbol] 41 |
| RVTISVDNSKNQVSLKLSSLTAQDTAVYYCAR | 1C1 | [symbol] 42 |
| RVTISVDNSKNQVSLKLSSVQAQDTAVYYCAR | 1C1 | [symbol] 43 |
| RVTISVDNSKNQFSFKMSSLTAADTAVYYCAR | 1C1 | [symbol] 44 |
| RVTISVDNSKNQFSFKMSSVQAADTAVYYCAR | 1C1 | [symbol] 45 |
| RVTISVDNSKNQFSFKMSSVTAQDTAVYYCAR | 1C1 | [symbol] 46 |
| RVTISVDNSKNQFSFKLSSLQAADTAVYYCAR | 1C | [symbol] 47 |
| RVTISVDNSKNQFSFKLSSLTAQDTAVYYCAR | 1C | [symbol] 48 |
| RVTISVDNSKNQFSFKLSSVQAQDTAVYYCAR | 1C1 | [symbol] 49 |
| RVTISVDNSKNQFSLKMSSLQAADTAVYYCAR | 1C1 | [symbol] 50 |
| RVTISVDNSKNQFSLKMSSLTAQDTAVYYCAR | 1C1 | [symbol] 51 |
| RVTISVDNSKNQFSLKMSSVQAQDTAVYYCAR | 1C1 | [symbol] 52 |
| RVTISVDNSKNQFSLKLSSLQAQDTAVYYCAR | 1C1 | [symbol] 53 |
| RVTISVDTSKSQVSFKMSSVTAADTAVYYCAR | 1C1 | [symbol] 54 |
| RVTISVDTSKSQVSFKLSSLTAADTAVYYCAR | 1C1 | [symbol] 55 |
| RVTISVDTSKSQVSFKLSSVQAADTAVYYCAR | 1C1 | [symbol] 56 |
| RVTISVDTSKSQVSFKLSSVTAQDTAVYYCAR | 1C1 | [symbol] 57 |
| RVTISVDTSKSQVSLKMSSLTAADTAVYYCAR | 1C1 | [symbol] 58 |
| RVTISVDTSKSQVSLKMSSVQAADTAVYYCAR | 1C1 | [symbol] 59 |
| RVTISVDTSKSQVSLKMSSVTAQDTAVYYCAR | 1C1 | [symbol] 60 |
| RVTISVDTSKSQVSLKLSSLQAADTAVYYCAR | 1C | [symbol] 61 |
| RVTISVDTSKSQVSLKLSSLTAQDTAVYYCAR | 1C1 | [symbol] 62 |
| RVTISVDTSKSQVSLKLSSVQAQDTAVYYCAR | 1C1 | [symbol] 63 |
| RVTISVDTSKSQFSFKMSSLTAADTAVYYCAR | 1C1 | [symbol] 64 |
| RVTISVDTSKSQFSFKMSSVQAADTAVYYCAR | 1C1 | [symbol] 65 |
| RVTISVDTSKSQFSFKMSSVTAQDTAVYYCAR | 1C1 | [symbol] 66 |
| RVTISVDTSKSQFSFKLSSLQAADTAVYYCAR | 1C1 | [symbol] 67 |
| RVTISVDTSKSQFSFKLSSLTAQDTAVYYCAR | 1C1 | [symbol] 68 |
| RVTISVDTSKSQFSFKLSSVQAQDTAVYYCAR | 1C1 | [symbol] 69 |
| RVTISVDTSKSQFSLKMSSLQAADTAVYYCAR | 1C1 | [symbol] 70 |
| RVTISVDTSKSQFSLKMSSLTAQDTAVYYCAR | 1C1 | [symbol] 71 |
| RVTISVDTSKSQFSLKMSSVQAQDTAVYYCAR | 1C1 | [symbol] 72 |
| RVTISVDTSKSQFSLKLSSLQAQDTAVYYCAR | 1C1 | [symbol] 73 |
| RVTISVDTSKNQVSFKMSSLTAADTAVYYCAR | 1C1 | [symbol] 74 |
| RVTISVDTSKNQVSFKMSSVQAADTAVYYCAR | 1C1 | [symbol] 75 |
| RVTISVDTSKNQVSFKMSSVTAQDTAVYYCAR | 1C1 | [symbol] 76 |
| RVTISVDTSKNQVSFKLSSLQAADTAVYYCAR | 1C1 | [symbol] 77 |
| RVTISVDTSKNQVSFKLSSLTAQDTAVYYCAR | 1C1 | [symbol] 78 |
| RVTISVDTSKNQVSFKLSSVQAQDTAVYYCAR | 1C1 | [symbol] 79 |
| RVTISVDTSKNQVSLKMSSLQAADTAVYYCAR | 1C1 | [symbol] 80 |
| RVTISVDTSKNQVSLKMSSLTAQDTAVYYCAR | 1C1 | [symbol] 81 |
| RVTISVDTSKNQVSLKMSSVQAQDTAVYYCAR | 1C1 | [symbol] 82 |
| RVTISVDTSKNQVSLKLSSLQAQDTAVYYCAR | 1C1 | [symbol] 83 |
| RVTISVDTSKNQFSFKMSSLQAADTAVYYCAR | 1C1 | [symbol] 84 |
| RVTISVDTSKNQFSFKMSSLTAQDTAVYYCAR | 1C1 | [symbol] 85 |
| RVTISVDTSKNQFSFKMSSVQAQDTAVYYCAR | 1C1 | [symbol] 86 |
| RVTISVDTSKNQFSFKLSSLQAQDTAVYYCAR | 1C1 | [symbol] 87 |
| RVTISVDTSKNQFSLKMSSLQAQDTAVYYCAR | 1C1 | [symbol] 88 |
| RLTISKDNSKSQVSLKLSSVTAADTAVYYCAR | 1C1 | [symbol] 89 |
| RLTISKDNSKSQFSFKLSSVTAADTAVYYCAR | 1C1 | [symbol] 90 |
| RLTISKDNSKSQFSLKMSSVTAADTAVYYCAR | 1C1 | [symbol] 91 |
| RLTISKDNSKSQFSLKLSSLTAADTAVYYCAR | 1C1 | [symbol] 92 |
| RLTISKDNSKSQFSLKLSSVQAADTAVYYCAR | 1C1 | [symbol] 93 |
| RLTISKDNSKSQFSLKLSSVTAQDTAVYYCAR | 1C1 | [symbol] 94 |
| RLTISKDNSKNQVSFKLSSVTAADTAVYYCAR | 1C1 | [symbol] 95 |
| RLTISKDNSKNQVSLKMSSVTAADTAVYYCAR | 1C1 | [symbol] 96 |
| RLTISKDNSKNQVSLKLSSLTAADTAVYYCAR | 1C1 | [symbol] 97 |
| RLTISKDNSKNQVSLKLSSVQAADTAVYYCAR | 1C1 | [symbol] 98 |
| RLTISKDNSKNQVSLKLSSVTAQDTAVYYCAR | 1C1 | [symbol] 99 |
| RLTISKDNSKNQFSFKMSSVTAADTAVYYCAR | 1C1 | 000 |
| RLTISKDNSKNQFSFKLSSLTAADTAVYYCAR | 1C1 | 001 |
| RLTISKDNSKNQFSFKLSSVQAADTAVYYCAR | 1C1 | 002 |
| RLTISKDNSKNQFSFKLSSVTAQDTAVYYCAR | 1C1 | 003 |
| RLTISKDNSKNQFSLKMSSLTAADTAVYYCAR | 1C1 | 004 |
| RLTISKDNSKNQFSLKMSSVQAADTAVYYCAR | 1C1 | 005 |
| RLTISKDNSKNQFSLKMSSVTAQDTAVYYCAR | 1C1 | 006 |
| RLTISKDNSKNQFSLKLSSLQAADTAVYYCAR | 1C1 | 007 |
| RLTISKDNSKNQFSLKLSSLTAQDTAVYYCAR | 1C1 | 008 |
| RLTISKDNSKNQFSLKLSSVQAQDTAVYYCAR | 1C1 | 009 |
| RLTISKDTSKSQVSFKLSSVTAADTAVYYCAR | 1C1 | 010 |
| RLTISKDTSKSQVSLKMSSVTAADTAVYYCAR | 1C1 | 011 |
| RLTISKDTSKSQVSLKLSSLTAADTAVYYCAR | 1C1 | 012 |
| RLTISKDTSKSQVSLKLSSVQAADTAVYYCAR | 1C1 | 013 |
| RLTISKDTSKSQVSLKLSSVTAQDTAVYYCAR | 1C1 | 014 |
| RLTISKDTSKSQFSFKMSSVTAADTAVYYCAR | 1C1 | 015 |
| RLTISKDTSKSQFSFKLSSLTAADTAVYYCAR | 1C1 | 016 |
| RLTISKDTSKSQFSFKLSSVQAADTAVYYCAR | 1C1 | 017 |
| RLTISKDTSKSQFSFKLSSVTAQDTAVYYCAR | 1C1 | 018 |
| RLTISKDTSKSQFSLKMSSLTAADTAVYYCAR | 1C1 | 019 |
| RLTISKDTSKSQFSLKMSSVQAADTAVYYCAR | 1C1 | 020 |
| RLTISKDTSKSQFSLKMSSVTAQDTAVYYCAR | 1C1 | 021 |
| RLTISKDTSKSQFSLKLSSLQAADTAVYYCAR | 1C1 | 022 |
| RLTISKDTSKSQFSLKLSSLTAQDTAVYYCAR | 1C1 | 023 |
| RLTISKDTSKSQFSLKLSSVQAQDTAVYYCAR | 1C1 | 024 |
| RLTISKDTSKNQVSFKMSSVTAADTAVYYCAR | 1C1 | 025 |
| RLTISKDTSKNQVSFKLSSLTAADTAVYYCAR | 1C1 | 026 |
| RLTISKDTSKNQVSFKLSSVQAADTAVYYCAR | 1C1 | 027 |
| RLTISKDTSKNQVSFKLSSVTAQDTAVYYCAR | 1C1 | 028 |
| RLTISKDTSKNQVSLKMSSLTAADTAVYYCAR | 1C1 | 029 |
| RLTISKDTSKNQVSLKMSSVQAADTAVYYCAR | 1C1 | 030 |
| RLTISKDTSKNQVSLKMSSVTAQDTAVYYCAR | 1C1 | 031 |
| RLTISKDTSKNQVSLKLSSLQAADTAVYYCAR | 1C1 | 032 |
| RLTISKDTSKNQVSLKLSSLTAQDTAVYYCAR | 1C1 | 033 |
| RLTISKDTSKNQVSLKLSSVQAQDTAVYYCAR | 1C1 | 034 |
| RLTISKDTSKNQFSFKMSSLTAADTAVYYCAR | 1C1 | 035 |
| RLTISKDTSKNQFSFKMSSVQAADTAVYYCAR | 1C1 | 036 |
| RLTISKDTSKNQFSFKMSSVTAQDTAVYYCAR | 1C1 | 037 |
| RLTISKDTSKNQFSFKLSSLQAADTAVYYCAR | 1C1 | 038 |
| RLTISKDTSKNQFSFKLSSLTAQDTAVYYCAR | 1C1 | 039 |
| RLTISKDTSKNQFSFKLSSVQAQDTAVYYCAR | 1C1 | 040 |
| RLTISKDTSKNQFSLKMSSLQAADTAVYYCAR | 1C1 | 041 |
| RLTISKDTSKNQFSLKMSSLTAQDTAVYYCAR | 1C1 | 042 |
| RLTISKDTSKNQFSLKMSSVQAQDTAVYYCAR | 1C1 | 043 |
| RLTISKDTSKNQFSLKLSSLQAQDTAVYYCAR | 1C1 | 044 |
| RLTISVDNSKSQVSFKLSSVTAADTAVYYCAR | 1C1 | 045 |
| RLTISVDNSKSQVSLKMSSVTAADTAVYYCAR | 1C1 | 046 |
| RLTISVDNSKSQVSLKLSSLTAADTAVYYCAR | 1C1 | 047 |
| RLTISVDNSKSQVSLKLSSVQAADTAVYYCAR | 1C1 | 048 |
| RLTISVDNSKSQVSLKLSSVTAQDTAVYYCAR | 1C1 | 049 |
| RLTISVDNSKSQFSFKMSSVTAADTAVYYCAR | 1C1 | 050 |
| RLTISVDNSKSQFSFKLSSLTAADTAVYYCAR | 1C1 | 051 |
| RLTISVDNSKSQFSFKLSSVQAADTAVYYCAR | 1C1 | 052 |
| RLTISVDNSKSQFSFKLSSVTAQDTAVYYCAR | 1C1 | 053 |
| RLTISVDNSKSQFSLKMSSLTAADTAVYYCAR | 1C1 | 054 |
| RLTISVDNSKSQFSLKMSSVQAADTAVYYCAR | 1C1 | 055 |
| RLTISVDNSKSQFSLKMSSVTAQDTAVYYCAR | 1C1 | 056 |
| RLTISVDNSKSQFSLKLSSLQAADTAVYYCAR | 1C1 | 057 |
| RLTISVDNSKSQFSLKLSSLTAQDTAVYYCAR | 1C1 | 058 |
| RLTISVDNSKSQFSLKLSSVQAQDTAVYYCAR | 1C1 | 059 |
| RLTISVDNSKNQVSFKMSSVTAADTAVYYCAR | 1C1 | 060 |
| RLTISVDNSKNQVSFKLSSLTAADTAVYYCAR | 1C1 | 061 |
| RLTISVDNSKNQVSFKLSSVQAADTAVYYCAR | 1C1 | 062 |
| RLTISVDNSKNQVSFKLSSVTAQDTAVYYCAR | 1C1 | 063 |
| RLTISVDNSKNQVSLKMSSLTAADTAVYYCAR | 1C1 | 064 |
| RLTISVDNSKNQVSLKMSSVQAADTAVYYCAR | 1C1 | 065 |
| RLTISVDNSKNQVSLKMSSVTAQDTAVYYCAR | 1C1 | 066 |
| RLTISVDNSKNQVSLKLSSLQAADTAVYYCAR | 1C1 | 067 |
| RLTISVDNSKNQVSLKLSSLTAQDTAVYYCAR | 1C1 | 068 |
| RLTISVDNSKNQVSLKLSSVQAQDTAVYYCAR | 1C1 | 069 |
| RLTISVDNSKNQFSFKMSSLTAADTAVYYCAR | 1C1 | 070 |
| RLTISVDNSKNQFSFKMSSVQAADTAVYYCAR | 1C1 | 071 |
| RLTISVDNSKNQFSFKMSSVTAQDTAVYYCAR | 1C1 | 072 |
| RLTISVDNSKNQFSFKLSSLQAADTAVYYCAR | 1C1 | 073 |
| RLTISVDNSKNQFSFKLSSLTAQDTAVYYCAR | 1C1 | 074 |
| RLTISVDNSKNQFSFKLSSVQAQDTAVYYCAR | 1C1 | 075 |
| RLTISVDNSKNQFSLKMSSLQAADTAVYYCAR | 1C1 | 076 |
| RLTISVDNSKNQFSLKMSSLTAQDTAVYYCAR | 1C1 | 077 |
| RLTISVDNSKNQFSLKMSSVQAQDTAVYYCAR | 1C1 | 078 |
| RLTISVDNSKNQFSLKLSSLQAQDTAVYYCAR | 1C1 | 079 |
| RLTISVDTSKSQVSFKMSSVTAADTAVYYCAR | 1C1 | 080 |
| RLTISVDTSKSQVSFKLSSLTAADTAVYYCAR | 1C1 | 081 |
| RLTISVDTSKSQVSFKLSSVQAADTAVYYCAR | 1C1 | 082 |
| RLTISVDTSKSQVSFKLSSVTAQDTAVYYCAR | 1C1 | 083 |
| RLTISVDTSKSQVSLKMSSLTAADTAVYYCAR | 1C1 | 084 |
| RLTISVDTSKSQVSLKMSSVQAADTAVYYCAR | 1C1 | 085 |
| RLTISVDTSKSQVSLKMSSVTAQDTAVYYCAR | 1C1 | 086 |
| RLTISVDTSKSQVSLKLSSLQAADTAVYYCAR | 1C1 | 087 |
| RLTISVDTSKSQVSLKLSSLTAQDTAVYYCAR | 1C1 | 088 |
| RLTISVDTSKSQVSLKLSSVQAQDTAVYYCAR | 1C1 | 089 |
| RLTISVDTSKSQFSFKMSSLTAADTAVYYCAR | 1C1 | 090 |
| RLTISVDTSKSQFSFKMSSVQAADTAVYYCAR | 1C1 | 091 |
| RLTISVDTSKSQFSFKMSSVTAQDTAVYYCAR | 1C1 | 092 |
| RLTISVDTSKSQFSFKLSSLQAADTAVYYCAR | 1C1 | 093 |
| RLTISVDTSKSQFSFKLSSLTAQDTAVYYCAR | 1C1 | 094 |
| RLTISVDTSKSQFSFKLSSVQAQDTAVYYCAR | 1C1 | 095 |
| RLTISVDTSKSQFSLKMSSLQAADTAVYYCAR | 1C1 | 096 |
| RLTISVDTSKSQFSLKMSSLTAQDTAVYYCAR | 1C1 | 097 |
| RLTISVDTSKSQFSLKMSSVQAQDTAVYYCAR | 1C1 | 098 |
| RLTISVDTSKSQFSLKLSSLQAQDTAVYYCAR | 1C1 | 099 |
| RLTISVDTSKNQVSFKMSSLTAADTAVYYCAR | 1C1 | 100 |
| RLTISVDTSKNQVSFKMSSVQAADTAVYYCAR | 1C1 | 101 |
| RLTISVDTSKNQVSFKMSSVTAQDTAVYYCAR | 1C1 | 102 |
| RLTISVDTSKNQVSFKLSSLQAADTAVYYCAR | 1C1 | 103 |
| RLTISVDTSKNQVSFKLSSLTAQDTAVYYCAR | 1C1 | 104 |
| RLTISVDTSKNQVSFKLSSVQAQDTAVYYCAR | 1C1 | 105 |
| RLTISVDTSKNQVSLKMSSLQAADTAVYYCAR | 1C1 | 106 |
| RLTISVDTSKNQVSLKMSSLTAQDTAVYYCAR | 1C1 | 107 |
| RLTISVDTSKNQVSLKMSSVQAQDTAVYYCAR | 1C1 | 108 |
| RLTISVDTSKNQVSLKLSSLQAQDTAVYYCAR | 1C1 | 109 |
| RLTISVDTSKNQFSFKMSSLQAADTAVYYCAR | 1C1 | 110 |
| RLTISVDTSKNQFSFKMSSLTAQDTAVYYCAR | 1C1 | 111 |
| RLTISVDTSKNQFSFKMSSVQAQDTAVYYCAR | 1C1 | 112 |
| RLTISVDTSKNQFSFKLSSLQAQDTAVYYCAR | 1C1 | 113 |
| RLTISVDTSKNQFSLKMSSLQAQDTAVYYCAR | 1C1 | 114 |
| RVTISKDNSKSQVSFKLSSVTAADTAVYYCAR | 1C1 | 115 |
| RVTISKDNSKSQVSLKMSSVTAADTAVYYCAR | 1C1 | 116 |
| RVTISKDNSKSQVSLKLSSLTAADTAVYYCAR | 1C1 | 117 |
| RVTISKDNSKSQVSLKLSSVQAADTAVYYCAR | 1C1 | 118 |
| RVTISKDNSKSQVSLKLSSVTAQDTAVYYCAR | 1C1 | 119 |
| RVTISKDNSKSQFSFKMSSVTAADTAVYYCAR | 1C1 | 120 |
| RVTISKDNSKSQFSFKLSSLTAADTAVYYCAR | 1C1 | 121 |
| RVTISKDNSKSQFSFKLSSVQAADTAVYYCAR | 1C1 | 122 |
| RVTISKDNSKSQFSFKLSSVTAQDTAVYYCAR | 1C1 | 123 |
| RVTISKDNSKSQFSLKMSSLTAADTAVYYCAR | 1C1 | 124 |
| RVTISKDNSKSQFSLKMSSVQAADTAVYYCAR | 1C1 | 125 |
| RVTISKDNSKSQFSLKMSSVTAQDTAVYYCAR | 1C1 | 126 |
| RVTISKDNSKSQFSLKLSSLQAADTAVYYCAR | 1C1 | 127 |
| RVTISKDNSKSQFSLKLSSLTAQDTAVYYCAR | 1C1 | 128 |
| RVTISKDNSKSQFSLKLSSVQAQDTAVYYCAR | 1C1 | 129 |
| RVTISKDNSKNQVSFKMSSVTAADTAVYYCAR | 1C1 | 130 |
| RVTISKDNSKNQVSFKLSSLTAADTAVYYCAR | 1C1 | 131 |
| RVTISKDNSKNQVSFKLSSVQAADTAVYYCAR | 1C1 | 132 |
| RVTISKDNSKNQVSFKLSSVTAQDTAVYYCAR | 1C1 | 133 |
| RVTISKDNSKNQVSLKMSSLTAADTAVYYCAR | 1C1 | 134 |
| RVTISKDNSKNQVSLKMSSVQAADTAVYYCAR | 1C1 | 135 |
| RVTISKDNSKNQVSLKMSSVTAQDTAVYYCAR | 1C1 | 136 |
| RVTISKDNSKNQVSLKLSSLQAADTAVYYCAR | 1C1 | 137 |
| RVTISKDNSKNQVSLKLSSLTAQDTAVYYCAR | 1C1 | 138 |
| RVTISKDNSKNQVSLKLSSVQAQDTAVYYCAR | 1C1 | 139 |
| RVTISKDNSKNQFSFKMSSLTAADTAVYYCAR | 1C1 | 140 |
| RVTISKDNSKNQFSFKMSSVQAADTAVYYCAR | 1C1 | 141 |
| RVTISKDNSKNQFSFKMSSVTAQDTAVYYCAR | 1C1 | 142 |
| RVTISKDNSKNQFSFKLSSLQAADTAVYYCAR | 1C1 | 143 |
| RVTISKDNSKNQFSFKLSSLTAQDTAVYYCAR | 1C1 | 144 |
| RVTISKDNSKNQFSFKLSSVQAQDTAVYYCAR | 1C1 | 145 |
| RVTISKDNSKNQFSLKMSSLQAADTAVYYCAR | 1C1 | 146 |
| RVTISKDNSKNQFSLKMSSLTAQDTAVYYCAR | 1C1 | 147 |
| RVTISKDNSKNQFSLKMSSVQAQDTAVYYCAR | 1C1 | 148 |
| RVTISKDNSKNQFSLKLSSLQAQDTAVYYCAR | 1C1 | 149 |
| RVTISKDTSKSQVSFKMSSVTAADTAVYYCAR | 1C1 | 150 |
| RVTISKDTSKSQVSFKLSSLTAADTAVYYCAR | 1C1 | 151 |
| RVTISKDTSKSQVSFKLSSVQAADTAVYYCAR | 1C | 152 |
| RVTISKDTSKSQVSFKLSSVTAQDTAVYYCAR | 1C1 | 153 |
| RVTISKDTSKSQVSLKMSSLTAADTAVYYCAR | 1C1 | 154 |
| RVTISKDTSKSQVSLKMSSVQAADTAVYYCAR | 1C1 | 155 |
| RVTISKDTSKSQVSLKMSSVTAQDTAVYYCAR | 1C1 | 156 |
| RVTISKDTSKSQVSLKLSSLQAADTAVYYCAR | 1C1 | 157 |
| RVTISKDTSKSQVSLKLSSLTAQDTAVYYCAR | 1C1 | 158 |
| RVTISKDTSKSQVSLKLSSVQAQDTAVYYCAR | 1C1 | 159 |
| RVTISKDTSKSQFSFKMSSLTAADTAVYYCAR | 1C1 | 160 |
| RVTISKDTSKSQFSFKMSSVQAADTAVYYCAR | 1C1 | 161 |
| RVTISKDTSKSQFSFKMSSVTAQDTAVYYCAR | 1C1 | 162 |
| RVTISKDTSKSQFSFKLSSLQAADTAVYYCAR | 1C1 | 163 |
| RVTISKDTSKSQFSFKLSSLTAQDTAVYYCAR | 1C1 | 164 |
| RVTISKDTSKSQFSFKLSSVQAQDTAVYYCAR | 1C1 | 165 |
| RVTISKDTSKSQFSLKMSSLQAADTAVYYCAR | 1C1 | 166 |
| RVTISKDTSKSQFSLKMSSLTAQDTAVYYCAR | 1C1 | 167 |
| RVTISKDTSKSQFSLKMSSVQAQDTAVYYCAR | 1C1 | 168 |
| RVTISKDTSKSQFSLKLSSLQAQDTAVYYCAR | 1C1 | 169 |
| RVTISKDTSKNQVSFKMSSLTAADTAVYYCAR | 1C1 | 170 |
| RVTISKDTSKNQVSFKMSSVQAADTAVYYCAR | 1C1 | 171 |
| RVTISKDTSKNQVSFKMSSVTAQDTAVYYCAR | 1C1 | 172 |
| RVTISKDTSKNQVSFKLSSLQAADTAVYYCAR | 1C1 | 173 |
| RVTISKDTSKNQVSFKLSSLTAQDTAVYYCAR | 1C1 | 174 |
| RVTISKDTSKNQVSFKLSSVQAQDTAVYYCAR | 1C1 | 175 |
| RVTISKDTSKNQVSLKMSSLQAADTAVYYCAR | 1C1 | 176 |
| RVTISKDTSKNQVSLKMSSLTAQDTAVYYCAR | 1C1 | 177 |
| RVTISKDTSKNQVSLKMSSVQAQDTAVYYCAR | 1C1 | 178 |
| RVTISKDTSKNQVSLKLSSLQAQDTAVYYCAR | 1C1 | 179 |
| RVTISKDTSKNQFSFKMSSLQAADTAVYYCAR | 1C1 | 180 |
| RVTISKDTSKNQFSFKMSSLTAQDTAVYYCAR | 1C1 | 181 |
| RVTISKDTSKNQFSFKMSSVQAQDTAVYYCAR | 1C1 | 182 |
| RVTISKDTSKNQFSFKLSSLQAQDTAVYYCAR | 1C1 | 183 |
| RVTISKDTSKNQFSLKMSSLQAQDTAVYYCAR | 1C1 | 184 |
| RVTISVDNSKSQVSFKMSSVTAADTAVYYCAR | 1C1 | 185 |
| RVTISVDNSKSQVSFKLSSLTAADTAVYYCAR | 1C1 | 186 |
| RVTISVDNSKSQVSFKLSSVQAADTAVYYCAR | 1C1 | 187 |
| RVTISVDNSKSQVSFKLSSVTAQDTAVYYCAR | 1C1 | 188 |
| RVTISVDNSKSQVSLKMSSLTAADTAVYYCAR | 1C1 | 189 |
| RVTISVDNSKSQVSLKMSSVQAADTAVYYCAR | 1C1 | 190 |
| RVTISVDNSKSQVSLKMSSVTAQDTAVYYCAR | 1C1 | 191 |
| RVTISVDNSKSQVSLKLSSLQAADTAVYYCAR | 1C1 | 192 |
| RVTISVDNSKSQVSLKLSSLTAQDTAVYYCAR | 1C1 | 193 |
| RVTISVDNSKSQVSLKLSSVQAQDTAVYYCAR | 1C1 | 194 |
| RVTISVDNSKSQFSFKMSSLTAADTAVYYCAR | 1C1 | 195 |
| RVTISVDNSKSQFSFKMSSVQAADTAVYYCAR | 1C1 | 196 |
| RVTISVDNSKSQFSFKMSSVTAQDTAVYYCAR | 1C1 | 197 |
| RVTISVDNSKSQFSFKLSSLQAADTAVYYCAR | 1C1 | 198 |
| RVTISVDNSKSQFSFKLSSLTAQDTAVYYCAR | 1C1 | 199 |
| RVTISVDNSKSQFSFKLSSVQAQDTAVYYCAR | 1C1 | 200 |
| RVTISVDNSKSQFSLKMSSLQAADTAVYYCAR | 1C1 | 201 |
| RVTISVDNSKSQFSLKMSSLTAQDTAVYYCAR | 1C1 | 202 |
| RVTISVDNSKSQFSLKMSSVQAQDTAVYYCAR | 1C1 | 203 |
| RVTISVDNSKSQFSLKLSSLQAQDTAVYYCAR | 1C1 | 204 |
| RVTISVDNSKNQVSFKMSSLTAADTAVYYCAR | 1C1 | 205 |
| RVTISVDNSKNQVSFKMSSVQAADTAVYYCAR | 1C1 | 206 |
| RVTISVDNSKNQVSFKMSSVTAQDTAVYYCAR | 1C1 | 207 |
| RVTISVDNSKNQVSFKLSSLQAADTAVYYCAR | 1C1 | 208 |
| RVTISVDNSKNQVSFKLSSLTAQDTAVYYCAR | 1C1 | 209 |
| RVTISVDNSKNQVSFKLSSVQAQDTAVYYCAR | 1C1 | 210 |
| RVTISVDNSKNQVSLKMSSLQAADTAVYYCAR | 1C1 | 211 |
| RVTISVDNSKNQVSLKMSSLTAQDTAVYYCAR | 1C1 | 212 |
| RVTISVDNSKNQVSLKMSSVQAQDTAVYYCAR | 1C1 | 213 |
| RVTISVDNSKNQVSLKLSSLQAQDTAVYYCAR | 1C1 | 214 |
| RVTISVDNSKNQFSFKMSSLQAADTAVYYCAR | 1C1 | 215 |
| RVTISVDNSKNQFSFKMSSLTAQDTAVYYCAR | 1C1 | 216 |
| RVTISVDNSKNQFSFKMSSVQAQDTAVYYCAR | 1C1 | 217 |
| RVTISVDNSKNQFSFKLSSLQAQDTAVYYCAR | 1C1 | 218 |
| RVTISVDNSKNQFSLKMSSLQAQDTAVYYCAR | 1C1 | 219 |
| RVTISVDTSKSQVSFKMSSLTAADTAVYYCAR | 1C1 | 220 |
| RVTISVDTSKSQVSFKMSSVQAADTAVYYCAR | 1C1 | 221 |
| RVTISVDTSKSQVSFKMSSVTAQDTAVYYCAR | 1C1 | 222 |
| RVTISVDTSKSQVSFKLSSLQAADTAVYYCAR | 1C1 | 223 |
| RVTISVDTSKSQVSFKLSSLTAQDTAVYYCAR | 1C1 | 224 |
| RVTISVDTSKSQVSFKLSSVQAQDTAVYYCAR | 1C1 | 225 |
| RVTISVDTSKSQVSLKMSSLQAADTAVYYCAR | 1C1 | 226 |
| RVTISVDTSKSQVSLKMSSLTAQDTAVYYCAR | 1C1 | 227 |
| RVTISVDTSKSQVSLKMSSVQAQDTAVYYCAR | 1C1 | 228 |
| RVTISVDTSKSQVSLKLSSLQAQDTAVYYCAR | 1C1 | 229 |
| RVTISVDTSKSQFSFKMSSLQAADTAVYYCAR | 1C1 | 230 |
| RVTISVDTSKSQFSFKMSSLTAQDTAVYYCAR | 1C1 | 231 |
| RVTISVDTSKSQFSFKMSSVQAQDTAVYYCAR | 1C1 | 232 |
| RVTISVDTSKSQFSFKLSSLQAQDTAVYYCAR | 1C1 | 233 |
| RVTISVDTSKSQFSLKMSSLQAQDTAVYYCAR | 1C1 | 234 |
| RVTISVDTSKNQVSFKMSSLQAADTAVYYCAR | 1C1 | 235 |
| RVTISVDTSKNQVSFKMSSLTAQDTAVYYCAR | 1C1 | 236 |
| RVTISVDTSKNQVSFKMSSVQAQDTAVYYCAR | 1C1 | 237 |
| RVTISVDTSKNQVSFKLSSLQAQDTAVYYCAR | 1C1 | 238 |
| RVTISVDTSKNQVSLKMSSLQAQDTAVYYCAR | 1C1 | 239 |
| RVTISVDTSKNQFSFKMSSLQAQDTAVYYCAR | 1C1 | 240 |
| RLTISKDNSKSQVSFKLSSVTAADTAVYYCAR | 1C1 | 241 |
| RLTISKDNSKSQVSLKMSSVTAADTAVYYCAR | 1C1 | 242 |
| RLTISKDNSKSQVSLKLSSLTAADTAVYYCAR | 1C1 | 243 |
| RLTISKDNSKSQVSLKLSSVQAADTAVYYCAR | 1C1 | 244 |
| RLTISKDNSKSQVSLKLSSVTAQDTAVYYCAR | 1C1 | 245 |
| RLTISKDNSKSQFSFKMSSVTAADTAVYYCAR | 1C1 | 246 |
| RLTISKDNSKSQFSFKLSSLTAADTAVYYCAR | 1C1 | 247 |
| RLTISKDNSKSQFSFKLSSVQAADTAVYYCAR | 1C1 | 248 |
| RLTISKDNSKSQFSFKLSSVTAQDTAVYYCAR | 1C1 | 249 |
| RLTISKDNSKSQFSLKMSSLTAADTAVYYCAR | 1C1 | 250 |
| RLTISKDNSKSQFSLKMSSVQAADTAVYYCAR | 1C1 | 251 |
| RLTISKDNSKSQFSLKMSSVTAQDTAVYYCAR | 1C1 | 252 |
| RLTISKDNSKSQFSLKLSSLQAADTAVYYCAR | 1C1 | 253 |
| RLTISKDNSKSQFSLKLSSLTAQDTAVYYCAR | 1C1 | 254 |
| RLTISKDNSKSQFSLKLSSVQAQDTAVYYCAR | 1C1 | 255 |
| RLTISKDNSKNQVSFKMSSVTAADTAVYYCAR | 1C1 | 256 |
| RLTISKDNSKNQVSFKLSSLTAADTAVYYCAR | 1C1 | 257 |
| RLTISKDNSKNQVSFKLSSVQAADTAVYYCAR | 1C1 | 258 |
| RLTISKDNSKNQVSFKLSSVTAQDTAVYYCAR | 1C1 | 259 |
| RLTISKDNSKNQVSLKMSSLTAADTAVYYCAR | 1C1 | 260 |
| RLTISKDNSKNQVSLKMSSVQAADTAVYYCAR | 1C1 | 261 |
| RLTISKDNSKNQVSLKMSSVTAQDTAVYYCAR | 1C1 | 262 |
| RLTISKDNSKNQVSLKLSSLQAADTAVYYCAR | 1C1 | 263 |
| RLTISKDNSKNQVSLKLSSLTAQDTAVYYCAR | 1C1 | 264 |
| RLTISKDNSKNQVSLKLSSVQAQDTAVYYCAR | 1C1 | 265 |
| RLTISKDNSKNQFSFKMSSLTAADTAVYYCAR | 1C1 | 266 |
| RLTISKDNSKNQFSFKMSSVQAADTAVYYCAR | 1C1 | 267 |
| RLTISKDNSKNQFSFKMSSVTAQDTAVYYCAR | 1C1 | 268 |
| RLTISKDNSKNQFSFKLSSLQAADTAVYYCAR | 1C1 | 269 |
| RLTISKDNSKNQFSFKLSSLTAQDTAVYYCAR | 1C1 | 270 |
| RLTISKDNSKNQFSFKLSSVQAQDTAVYYCAR | 1C1 | 271 |
| RLTISKDNSKNQFSLKMSSLQAADTAVYYCAR | 1C1 | 272 |
| RLTISKDNSKNQFSLKMSSLTAQDTAVYYCAR | 1C1 | 273 |
| RLTISKDNSKNQFSLKMSSVQAQDTAVYYCAR | 1C1 | 274 |
| RLTISKDNSKNQFSLKLSSLQAQDTAVYYCAR | 1C1 | 275 |
| RLTISKDTSKSQVSFKMSSVTAADTAVYYCAR | 1C1 | 276 |
| RLTISKDTSKSQVSFKLSSLTAADTAVYYCAR | 1C1 | 277 |
| RLTISKDTSKSQVSFKLSSVQAADTAVYYCAR | 1C1 | 278 |
| RLTISKDTSKSQVSFKLSSVTAQDTAVYYCAR | 1C1 | 279 |
| RLTISKDTSKSQVSLKMSSLTAADTAVYYCAR | 1C1 | 280 |
| RLTISKDTSKSQVSLKMSSVQAADTAVYYCAR | 1C1 | 281 |
| RLTISKDTSKSQVSLKMSSVTAQDTAVYYCAR | 1C1 | 282 |
| RLTISKDTSKSQVSLKLSSLQAADTAVYYCAR | 1C1 | 283 |
| RLTISKDTSKSQVSLKLSSLTAQDTAVYYCAR | 1C1 | 284 |
| RLTISKDTSKSQVSLKLSSVQAQDTAVYYCAR | 1C1 | 285 |
| RLTISKDTSKSQFSFKMSSLTAADTAVYYCAR | 1C1 | 286 |
| RLTISKDTSKSQFSFKMSSVQAADTAVYYCAR | 1C1 | 287 |
| RLTISKDTSKSQFSFKMSSVTAQDTAVYYCAR | 1C1 | 288 |
| RLTISKDTSKSQFSFKLSSLQAADTAVYYCAR | 1C1 | 289 |
| RLTISKDTSKSQFSFKLSSLTAQDTAVYYCAR | 1C1 | 290 |
| RLTISKDTSKSQFSFKLSSVQAQDTAVYYCAR | 1C1 | 291 |
| RLTISKDTSKSQFSLKMSSLQAADTAVYYCAR | 1C1 | 292 |
| RLTISKDTSKSQFSLKMSSLTAQDTAVYYCAR | 1C1 | 293 |
| RLTISKDTSKSQFSLKMSSVQAQDTAVYYCAR | 1C1 | 294 |
| RLTISKDTSKSQFSLKLSSLQAQDTAVYYCAR | 1C1 | 295 |
| RLTISKDTSKNQVSFKMSSLTAADTAVYYCAR | 1C1 | 296 |
| RLTISKDTSKNQVSFKMSSVQAADTAVYYCAR | 1C1 | 297 |
| RLTISKDTSKNQVSFKMSSVTAQDTAVYYCAR | 1C1 | 298 |
| RLTISKDTSKNQVSFKLSSLQAADTAVYYCAR | 1C1 | 299 |
| RLTISKDTSKNQVSFKLSSLTAQDTAVYYCAR | 1C1 | 300 |
| RLTISKDTSKNQVSFKLSSVQAQDTAVYYCAR | 1C1 | 301 |
| RLTISKDTSKNQVSLKMSSLQAADTAVYYCAR | 1C1 | 302 |
| RLTISKDTSKNQVSLKMSSLTAQDTAVYYCAR | 1C1 | 303 |
| RLTISKDTSKNQVSLKMSSVQAQDTAVYYCAR | 1C1 | 304 |
| RLTISKDTSKNQVSLKLSSLQAQDTAVYYCAR | 1C1 | 305 |
| RLTISKDTSKNQFSFKMSSLQAADTAVYYCAR | 1C1 | 306 |
| RLTISKDTSKNQFSFKMSSLTAQDTAVYYCAR | 1C1 | 307 |
| RLTISKDTSKNQFSFKMSSVQAQDTAVYYCAR | 1C1 | 308 |
| RLTISKDTSKNQFSFKLSSLQAQDTAVYYCAR | 1C1 | 309 |
| RLTISKDTSKNQFSLKMSSLQAQDTAVYYCAR | 1C1 | 310 |
| RLTISVDNSKSQVSFKMSSVTAADTAVYYCAR | 1C1 | 311 |
| RLTISVDNSKSQVSFKLSSLTAADTAVYYCAR | 1C1 | 312 |
| RLTISVDNSKSQVSFKLSSVQAADTAVYYCAR | 1C1 | 313 |
| RLTISVDNSKSQVSFKLSSVTAQDTAVYYCAR | 1C1 | 314 |
| RLTISVDNSKSQVSLKMSSLTAADTAVYYCAR | 1C1 | 315 |
| RLTISVDNSKSQVSLKMSSVQAADTAVYYCAR | 1C1 | 316 |
| RLTISVDNSKSQVSLKMSSVTAQDTAVYYCAR | 1C1 | 317 |
| RLTISVDNSKSQVSLKLSSLQAADTAVYYCAR | 1C1 | 318 |
| RLTISVDNSKSQVSLKLSSLTAQDTAVYYCAR | 1C1 | 319 |
| RLTISVDNSKSQVSLKLSSVQAQDTAVYYCAR | 1C1 | 320 |
| RLTISVDNSKSQFSFKMSSLTAADTAVYYCAR | 1C1 | 321 |
| RLTISVDNSKSQFSFKMSSVQAADTAVYYCAR | 1C1 | 322 |
| RLTISVDNSKSQFSFKMSSVTAQDTAVYYCAR | 1C1 | 323 |
| RLTISVDNSKSQFSFKLSSLQAADTAVYYCAR | 1C1 | 324 |
| RLTISVDNSKSQFSFKLSSLTAQDTAVYYCAR | 1C1 | 325 |
| RLTISVDNSKSQFSFKLSSVQAQDTAVYYCAR | 1C1 | 326 |
| RLTISVDNSKSQFSLKMSSLQAADTAVYYCAR | 1C1 | 327 |
| RLTISVDNSKSQFSLKMSSLTAQDTAVYYCAR | 1C1 | 328 |
| RLTISVDNSKSQFSLKMSSVQAQDTAVYYCAR | 1C1 | 329 |
| RLTISVDNSKSQFSLKLSSLQAQDTAVYYCAR | 1C | 330 |
| RLTISVDNSKNQVSFKMSSLTAADTAVYYCAR | 1C1 | 331 |
| RLTISVDNSKNQVSFKMSSVQAADTAVYYCAR | 1C1 | 332 |
| RLTISVDNSKNQVSFKMSSVTAQDTAVYYCAR | 1C1 | 333 |
| RLTISVDNSKNQVSFKLSSLQAADTAVYYCAR | 1C1 | 334 |
| RLTISVDNSKNQVSFKLSSLTAQDTAVYYCAR | 1C1 | 335 |
| RLTISVDNSKNQVSFKLSSVQAQDTAVYYCAR | 1C1 | 336 |
| RLTISVDNSKNQVSLKMSSLQAADTAVYYCAR | 1C1 | 337 |
| RLTISVDNSKNQVSLKMSSLTAQDTAVYYCAR | 1C1 | 338 |
| RLTISVDNSKNQVSLKMSSVQAQDTAVYYCAR | 1C1 | 339 |
| RLTISVDNSKNQVSLKLSSLQAQDTAVYYCAR | 1C1 | 340 |
| RLTISVDNSKNQFSFKMSSLQAADTAVYYCAR | 1C | 341 |
| RLTISVDNSKNQFSFKMSSLTAQDTAVYYCAR | 1C1 | 342 |
| RLTISVDNSKNQFSFKMSSVQAQDTAVYYCAR | 1C1 | 343 |
| RLTISVDNSKNQFSFKLSSLQAQDTAVYYCAR | 1C1 | 344 |
| RLTISVDNSKNQFSLKMSSLQAQDTAVYYCAR | 1C1 | 345 |
| RLTISVDTSKSQVSFKMSSLTAADTAVYYCAR | 1C1 | 346 |
| RLTISVDTSKSQVSFKMSSVQAADTAVYYCAR | 1C1 | 347 |
| RLTISVDTSKSQVSFKMSSVTAQDTAVYYCAR | 1C1 | 348 |
| RLTISVDTSKSQVSFKLSSLQAADTAVYYCAR | 1C1 | 349 |
| RLTISVDTSKSQVSFKLSSLTAQDTAVYYCAR | 1C1 | 350 |
| RLTISVDTSKSQVSFKLSSVQAQDTAVYYCAR | 1C1 | 351 |
| RLTISVDTSKSQVSLKMSSLQAADTAVYYCAR | 1C1 | 352 |
| RLTISVDTSKSQVSLKMSSLTAQDTAVYYCAR | 1C1 | 353 |
| RLTISVDTSKSQVSLKMSSVQAQDTAVYYCAR | 1C1 | 354 |
| RLTISVDTSKSQVSLKLSSLQAQDTAVYYCAR | 1C1 | 355 |
| RLTISVDTSKSQFSFKMSSLQAADTAVYYCAR | 1C1 | 356 |
| RLTISVDTSKSQFSFKMSSLTAQDTAVYYCAR | 1C1 | 357 |
| RLTISVDTSKSQFSFKMSSVQAQDTAVYYCAR | 1C1 | 358 |
| RLTISVDTSKSQFSFKLSSLQAQDTAVYYCAR | 1C1 | 359 |
| RLTISVDTSKSQFSLKMSSLQAQDTAVYYCAR | 1C1 | 360 |
| RLTISVDTSKNQVSFKMSSLQAADTAVYYCAR | 1C1 | 361 |
| RLTISVDTSKNQVSFKMSSLTAQDTAVYYCAR | 1C1 | 362 |
| RLTISVDTSKNQVSFKMSSVQAQDTAVYYCAR | 1C1 | 363 |
| RLTISVDTSKNQVSFKLSSLQAQDTAVYYCAR | 1C1 | 364 |
| RLTISVDTSKNQVSLKMSSLQAQDTAVYYCAR | 1C1 | 365 |
| RLTISVDTSKNQFSFKMSSLQAQDTAVYYCAR | 1C1 | 366 |
| RVTISKDNSKSQVSFKMSSVTAADTAVYYCAR | 1C1 | 367 |
| RVTISKDNSKSQVSFKLSSLTAADTAVYYCAR | 1C1 | 368 |
| RVTISKDNSKSQVSFKLSSVQAADTAVYYCAR | 1C1 | 369 |
| RVTISKDNSKSQVSFKLSSVTAQDTAVYYCAR | 1C1 | 370 |
| RVTISKDNSKSQVSLKMSSLTAADTAVYYCAR | 1C1 | 371 |
| RVTISKDNSKSQVSLKMSSVQAADTAVYYCAR | 1C1 | 372 |
| RVTISKDNSKSQVSLKMSSVTAQDTAVYYCAR | 1C1 | 373 |
| RVTISKDNSKSQVSLKLSSLQAADTAVYYCAR | 1C1 | 374 |
| RVTISKDNSKSQVSLKLSSLTAQDTAVYYCAR | 1C1 | 375 |
| RVTISKDNSKSQVSLKLSSVQAQDTAVYYCAR | 1C1 | 376 |
| RVTISKDNSKSQFSFKMSSLTAADTAVYYCAR | 1C1 | 377 |
| RVTISKDNSKSQFSFKMSSVQAADTAVYYCAR | 1C1 | 378 |
| RVTISKDNSKSQFSFKMSSVTAQDTAVYYCAR | 1C1 | 379 |
| RVTISKDNSKSQFSFKLSSLQAADTAVYYCAR | 1C1 | 380 |
| RVTISKDNSKSQFSFKLSSLTAQDTAVYYCAR | 1C1 | 381 |
| RVTISKDNSKSQFSFKLSSVQAQDTAVYYCAR | 1C1 | 382 |
| RVTISKDNSKSQFSLKMSSLQAADTAVYYCAR | 1C1 | 383 |
| RVTISKDNSKSQFSLKMSSLTAQDTAVYYCAR | 1C1 | 384 |
| RVTISKDNSKSQFSLKMSSVQAQDTAVYYCAR | 1C1 | 385 |
| RVTISKDNSKSQFSLKLSSLQAQDTAVYYCAR | 1C1 | 386 |
| RVTISKDNSKNQVSFKMSSLTAADTAVYYCAR | 1C1 | 387 |
| RVTISKDNSKNQVSFKMSSVQAADTAVYYCAR | 1C1 | 388 |
| RVTISKDNSKNQVSFKMSSVTAQDTAVYYCAR | 1C1 | 389 |
| RVTISKDNSKNQVSFKLSSLQAADTAVYYCAR | 1C1 | 390 |
| RVTISKDNSKNQVSFKLSSLTAQDTAVYYCAR | 1C1 | 391 |
| RVTISKDNSKNQVSFKLSSVQAQDTAVYYCAR | 1C1 | 392 |
| RVTISKDNSKNQVSLKMSSLQAADTAVYYCAR | 1C1 | 393 |
| RVTISKDNSKNQVSLKMSSLTAQDTAVYYCAR | 1C1 | 394 |
| RVTISKDNSKNQVSLKMSSVQAQDTAVYYCAR | 1C1 | 395 |
| RVTISKDNSKNQVSLKLSSLQAQDTAVYYCAR | 1C1 | 396 |
| RVTISKDNSKNQFSFKMSSLQAADTAVYYCAR | 1C1 | 397 |
| RVTISKDNSKNQFSFKMSSLTAQDTAVYYCAR | 1C1 | 398 |
| RVTISKDNSKNQFSFKMSSVQAQDTAVYYCAR | 1C1 | 399 |
| RVTISKDNSKNQFSFKLSSLQAQDTAVYYCAR | 1C1 | 400 |
| RVTISKDNSKNQFSLKMSSLQAQDTAVYYCAR | 1C1 | 401 |
| RVTISKDTSKSQVSFKMSSLTAADTAVYYCAR | 1C1 | 402 |
| RVTISKDTSKSQVSFKMSSVQAADTAVYYCAR | 1C1 | 403 |
| RVTISKDTSKSQVSFKMSSVTAQDTAVYYCAR | 1C1 | 404 |
| RVTISKDTSKSQVSFKLSSLQAADTAVYYCAR | 1C1 | 405 |
| RVTISKDTSKSQVSFKLSSLTAQDTAVYYCAR | 1C1 | 406 |
| RVTISKDTSKSQVSFKLSSVQAQDTAVYYCAR | 1C1 | 407 |
| RVTISKDTSKSQVSLKMSSLQAADTAVYYCAR | 1C1 | 408 |
| RVTISKDTSKSQVSLKMSSLTAQDTAVYYCAR | 1C1 | 409 |
| RVTISKDTSKSQVSLKMSSVQAQDTAVYYCAR | 1C1 | 410 |
| RVTISKDTSKSQVSLKLSSLQAQDTAVYYCAR | 1C1 | 411 |
| RVTISKDTSKSQFSFKMSSLQAADTAVYYCAR | 1C1 | 412 |
| RVTISKDTSKSQFSFKMSSLTAQDTAVYYCAR | 1C1 | 413 |
| RVTISKDTSKSQFSFKMSSVQAQDTAVYYCAR | 1C1 | 414 |
| RVTISKDTSKSQFSFKLSSLQAQDTAVYYCAR | 1C1 | 415 |
| RVTISKDTSKSQFSLKMSSLQAQDTAVYYCAR | 1C1 | 416 |
| RVTISKDTSKNQVSFKMSSLQAADTAVYYCAR | 1C1 | 417 |
| RVTISKDTSKNQVSFKMSSLTAQDTAVYYCAR | 1C1 | 418 |
| RVTISKDTSKNQVSFKMSSVQAQDTAVYYCAR | 1C1 | 419 |
| RVTISKDTSKNQVSFKLSSLQAQDTAVYYCAR | 1C1 | 420 |
| RVTISKDTSKNQVSLKMSSLQAQDTAVYYCAR | 1C1 | 421 |
| RVTISKDTSKNQFSFKMSSLQAQDTAVYYCAR | 1C1 | 422 |
| RVTISVDNSKSQVSFKMSSLTAADTAVYYCAR | 1C1 | 423 |
| RVTISVDNSKSQVSFKMSSVQAADTAVYYCAR | 1C1 | 424 |
| RVTISVDNSKSQVSFKMSSVTAQDTAVYYCAR | 1C1 | 425 |
| RVTISVDNSKSQVSFKLSSLQAADTAVYYCAR | 1C1 | 426 |
| RVTISVDNSKSQVSFKLSSLTAQDTAVYYCAR | 1C1 | 427 |
| RVTISVDNSKSQVSFKLSSVQAQDTAVYYCAR | 1C1 | 428 |
| RVTISVDNSKSQVSLKMSSLQAADTAVYYCAR | 1C1 | 429 |
| RVTISVDNSKSQVSLKMSSLTAQDTAVYYCAR | 1C1 | 430 |
| RVTISVDNSKSQVSLKMSSVQAQDTAVYYCAR | 1C1 | 431 |
| RVTISVDNSKSQVSLKLSSLQAQDTAVYYCAR | 1C1 | 432 |
| RVTISVDNSKSQFSFKMSSLQAADTAVYYCAR | 1C1 | 433 |
| RVTISVDNSKSQFSFKMSSLTAQDTAVYYCAR | 1C1 | 434 |
| RVTISVDNSKSQFSFKMSSVQAQDTAVYYCAR | 1C1 | 435 |
| RVTISVDNSKSQFSFKLSSLQAQDTAVYYCAR | 1C1 | 436 |
| RVTISVDNSKSQFSLKMSSLQAQDTAVYYCAR | 1C1 | 437 |
| RVTISVDNSKNQVSFKMSSLQAADTAVYYCAR | 1C1 | 438 |
| RVTISVDNSKNQVSFKMSSLTAQDTAVYYCAR | 1C1 | 439 |
| RVTISVDNSKNQVSFKMSSVQAQDTAVYYCAR | 1C1 | 440 |
| RVTISVDNSKNQVSFKLSSLQAQDTAVYYCAR | 1C1 | 441 |
| RVTISVDNSKNQVSLKMSSLQAQDTAVYYCAR | 1C1 | 442 |
| RVTISVDNSKNQFSFKMSSLQAQDTAVYYCAR | 1C1 | 443 |
| RVTISVDTSKSQVSFKMSSLQAADTAVYYCAR | 1C1 | 444 |
| RVTISVDTSKSQVSFKMSSLTAQDTAVYYCAR | 1C1 | 445 |
| RVTISVDTSKSQVSFKMSSVQAQDTAVYYCAR | 1C1 | 446 |
| RVTISVDTSKSQVSFKLSSLQAQDTAVYYCAR | 1C1 | 447 |
| RVTISVDTSKSQVSLKMSSLQAQDTAVYYCAR | 1C1 | 448 |
| RVTISVDTSKSQFSFKMSSLQAQDTAVYYCAR | 1C1 | 449 |
| RVTISVDTSKNQVSFKMSSLQAQDTAVYYCAR | 1C1 | 450 |
| RLTISKDNSKSQVSFKMSSVTAADTAVYYCAR | 1C1 | 451 |
| RLTISKDNSKSQVSFKLSSLTAADTAVYYCAR | 1C1 | 452 |
| RLTISKDNSKSQVSFKLSSVQAADTAVYYCAR | 1C1 | 453 |
| RLTISKDNSKSQVSFKLSSVTAQDTAVYYCAR | 1C1 | 454 |
| RLTISKDNSKSQVSLKMSSLTAADTAVYYCAR | 1C1 | 455 |
| RLTISKDNSKSQVSLKMSSVQAADTAVYYCAR | 1C1 | 456 |
| RLTISKDNSKSQVSLKMSSVTAQDTAVYYCAR | 1C1 | 457 |
| RLTISKDNSKSQVSLKLSSLQAADTAVYYCAR | 1C1 | 458 |
| RLTISKDNSKSQVSLKLSSLTAQDTAVYYCAR | 1C1 | 459 |
| RLTISKDNSKSQVSLKLSSVQAQDTAVYYCAR | 1C1 | 460 |
| RLTISKDNSKSQFSFKMSSLTAADTAVYYCAR | 1C1 | 146 |
| RLTISKDNSKSQFSFKMSSVQAADTAVYYCAR | 1C1 | 462 |
| RLTISKDNSKSQFSFKMSSVTAQDTAVYYCAR | 1C1 | 463 |
| RLTISKDNSKSQFSFKLSSLQAADTAVYYCAR | 1C1 | 464 |
| RLTISKDNSKSQFSFKLSSLTAQDTAVYYCAR | 1C1 | 465 |
| RLTISKDNSKSQFSFKLSSVQAQDTAVYYCAR | 1C1 | 466 |
| RLTISKDNSKSQFSLKMSSLQAADTAVYYCAR | 1C1 | 467 |
| RLTISKDNSKSQFSLKMSSLTAQDTAVYYCAR | 1C1 | 468 |
| RLTISKDNSKSQFSLKMSSVQAQDTAVYYCAR | 1C1 | 469 |
| RLTISKDNSKSQFSLKLSSLQAQDTAVYYCAR | 1C1 | 470 |
| RLTISKDNSKNQVSFKMSSLTAADTAVYYCAR | 1C1 | 471 |
| RLTISKDNSKNQVSFKMSSVQAADTAVYYCAR | 1C1 | 472 |
| RLTISKDNSKNQVSFKMSSVTAQDTAVYYCAR | 1C1 | 473 |
| RLTISKDNSKNQVSFKLSSLQAADTAVYYCAR | 1C1 | 474 |
| RLTISKDNSKNQVSFKLSSLTAQDTAVYYCAR | 1C1 | 475 |
| RLTISKDNSKNQVSFKLSSVQAQDTAVYYCAR | 1C1 | 476 |
| RLTISKDNSKNQVSLKMSSLQAADTAVYYCAR | 1C1 | 477 |
| RLTISKDNSKNQVSLKMSSLTAQDTAVYYCAR | 1C1 | 478 |
| RLTISKDNSKNQVSLKMSSVQAQDTAVYYCAR | 1C1 | 479 |
| RLTISKDNSKNQVSLKLSSLQAQDTAVYYCAR | 1C1 | 480 |
| RLTISKDNSKNQFSFKMSSLQAADTAVYYCAR | 1C1 | 481 |
| RLTISKDNSKNQFSFKMSSLTAQDTAVYYCAR | 1C1 | 482 |
| RLTISKDNSKNQFSFKMSSVQAQDTAVYYCAR | 1C1 | 483 |
| RLTISKDNSKNQFSFKLSSLQAQDTAVYYCAR | 1C1 | 484 |
| RLTISKDNSKNQFSLKMSSLQAQDTAVYYCAR | 1C1 | 485 |
| RLTISKDTSKSQVSFKMSSLTAADTAVYYCAR | 1C1 | 486 |
| RLTISKDTSKSQVSFKMSSVQAADTAVYYCAR | 1C1 | 487 |
| RLTISKDTSKSQVSFKMSSVTAQDTAVYYCAR | 1C1 | 488 |
| RLTISKDTSKSQVSFKLSSLQAADTAVYYCAR | 1C1 | 489 |
| RLTISKDTSKSQVSFKLSSLTAQDTAVYYCAR | 1C1 | 490 |
| RLTISKDTSKSQVSFKLSSVQAQDTAVYYCAR | 1C1 | 491 |
| RLTISKDTSKSQVSLKMSSLQAADTAVYYCAR | 1C1 | 492 |
| RLTISKDTSKSQVSLKMSSLTAQDTAVYYCAR | 1C1 | 493 |
| RLTISKDTSKSQVSLKMSSVQAQDTAVYYCAR | 1C1 | 494 |
| RLTISKDTSKSQVSLKLSSLQAQDTAVYYCAR | 1C1 | 495 |
| RLTISKDTSKSQFSFKMSSLQAADTAVYYCAR | 1C1 | 496 |
| RLTISKDTSKSQFSFKMSSLTAQDTAVYYCAR | 1C1 | 497 |
| RLTISKDTSKSQFSFKMSSVQAQDTAVYYCAR | 1C1 | 498 |
| RLTISKDTSKSQFSFKLSSLQAQDTAVYYCAR | 1C1 | 499 |
| RLTISKDTSKSQFSLKMSSLQAQDTAVYYCAR | 1C1 | 500 |
| RLTISKDTSKNQVSFKMSSLQAADTAVYYCAR | 1C1 | 501 |
| RLTISKDTSKNQVSFKMSSLTAQDTAVYYCAR | 1C1 | 502 |
| RLTISKDTSKNQVSFKMSSVQAQDTAVYYCAR | 1C1 | 503 |
| RLTISKDTSKNQVSFKLSSLQAQDTAVYYCAR | 1C1 | 504 |
| RLTISKDTSKNQVSLKMSSLQAQDTAVYYCAR | 1C1 | 505 |
| RLTISKDTSKNQFSFKMSSLQAQDTAVYYCAR | 1C1 | 506 |
| RLTISVDNSKSQVSFKMSSLTAADTAVYYCAR | 1C1 | 507 |
| RLTISVDNSKSQVSFKMSSVQAADTAVYYCAR | 1C1 | 508 |
| RLTISVDNSKSQVSFKMSSVTAQDTAVYYCAR | 1C1 | 509 |
| RLTISVDNSKSQVSFKLSSLQAADTAVYYCAR | 1C1 | 510 |
| RLTISVDNSKSQVSFKLSSLTAQDTAVYYCAR | 1C1 | 511 |
| RLTISVDNSKSQVSFKLSSVQAQDTAVYYCAR | 1C1 | 512 |
| RLTISVDNSKSQVSLKMSSLQAADTAVYYCAR | 1C1 | 513 |
| RLTISVDNSKSQVSLKMSSLTAQDTAVYYCAR | 1C1 | 514 |
| RLTISVDNSKSQVSLKMSSVQAQDTAVYYCAR | 1C1 | 515 |
| RLTISVDNSKSQVSLKLSSLQAQDTAVYYCAR | 1C1 | 516 |
| RLTISVDNSKSQFSFKMSSLQAADTAVYYCAR | 1C1 | 517 |
| RLTISVDNSKSQFSFKMSSLTAQDTAVYYCAR | 1C1 | 518 |
| RLTISVDNSKSQFSFKMSSVQAQDTAVYYCAR | 1C1 | 519 |
| RLTISVDNSKSQFSFKLSSLQAQDTAVYYCAR | 1C1 | 520 |
| RLTISVDNSKSQFSLKMSSLQAQDTAVYYCAR | 1C1 | 521 |
| RLTISVDNSKNQVSFKMSSLQAADTAVYYCAR | 1C1 | 522 |
| RLTISVDNSKNQVSFKMSSLTAQDTAVYYCAR | 1C1 | 523 |
| RLTISVDNSKNQVSFKMSSVQAQDTAVYYCAR | 1C1 | 524 |
| RLTISVDNSKNQVSFKLSSLQAQDTAVYYCAR | 1C1 | 525 |
| RLTISVDNSKNQVSLKMSSLQAQDTAVYYCAR | 1C1 | 526 |
| RLTISVDNSKNQFSFKMSSLQAQDTAVYYCAR | 1C1 | 527 |
| RLTISVDTSKSQVSFKMSSLQAADTAVYYCAR | 1C1 | 528 |
| RLTISVDTSKSQVSFKMSSLTAQDTAVYYCAR | 1C1 | 529 |
| RLTISVDTSKSQVSFKMSSVQAQDTAVYYCAR | 1C1 | 530 |
| RLTISVDTSKSQVSFKLSSLQAQDTAVYYCAR | 1C1 | 531 |
| RLTISVDTSKSQVSLKMSSLQAQDTAVYYCAR | 1C1 | 532 |
| RLTISVDTSKSQFSFKMSSLQAQDTAVYYCAR | 1C1 | 533 |
| RLTISVDTSKNQVSFKMSSLQAQDTAVYYCAR | 1C1 | 534 |
| RVTISKDNSKSQVSFKMSSLTAADTAVYYCAR | 1C1 | 535 |
| RVTISKDNSKSQVSFKMSSVQAADTAVYYCAR | 1C1 | 536 |
| RVTISKDNSKSQVSFKMSSVTAQDTAVYYCAR | 1C1 | 537 |
| RVTISKDNSKSQVSFKLSSLQAADTAVYYCAR | 1C1 | 538 |
| RVTISKDNSKSQVSFKLSSLTAQDTAVYYCAR | 1C1 | 539 |
| RVTISKDNSKSQVSFKLSSVQAQDTAVYYCAR | 1C1 | 540 |
| RVTISKDNSKSQVSLKMSSLQAADTAVYYCAR | 1C1 | 541 |
| RVTISKDNSKSQVSLKMSSLTAQDTAVYYCAR | 1C1 | 542 |
| RVTISKDNSKSQVSLKMSSVQAQDTAVYYCAR | 1C1 | 543 |
| RVTISKDNSKSQVSLKLSSLQAQDTAVYYCAR | 1C1 | 544 |
| RVTISKDNSKSQFSFKMSSLQAADTAVYYCAR | 1C1 | 545 |
| RVTISKDNSKSQFSFKMSSLTAQDTAVYYCAR | 1C1 | 546 |
| RVTISKDNSKSQFSFKMSSVQAQDTAVYYCAR | 1C1 | 547 |
| RVTISKDNSKSQFSFKLSSLQAQDTAVYYCAR | 1C1 | 548 |
| RVTISKDNSKSQFSLKMSSLQAQDTAVYYCAR | 1C1 | 549 |
| RVTISKDNSKNQVSFKMSSLQAADTAVYYCAR | 1C1 | 550 |
| RVTISKDNSKNQVSFKMSSLTAQDTAVYYCAR | 1C1 | 551 |
| RVTISKDNSKNQVSFKMSSVQAQDTAVYYCAR | 1C1 | 552 |
| RVTISKDNSKNQVSFKLSSLQAQDTAVYYCAR | 1C1 | 553 |
| RVTISKDNSKNQVSLKMSSLQAQDTAVYYCAR | 1C1 | 554 |
| RVTISKDNSKNQFSFKMSSLQAQDTAVYYCAR | 1C1 | 555 |
| RVTISKDTSKSQVSFKMSSLQAADTAVYYCAR | 1C1 | 556 |
| RVTISKDTSKSQVSFKMSSLTAQDTAVYYCAR | 1C1 | 557 |
| RVTISKDTSKSQVSFKMSSVQAQDTAVYYCAR | 1C1 | 558 |
| RVTISKDTSKSQVSFKLSSLQAQDTAVYYCAR | 1C1 | 559 |
| RVTISKDTSKSQVSLKMSSLQAQDTAVYYCAR | 1C1 | 560 |
| RVTISKDTSKSQFSFKMSSLQAQDTAVYYCAR | 1C1 | 561 |
| RVTISKDTSKNQVSFKMSSLQAQDTAVYYCAR | 1C1 | 562 |
| RVTISVDNSKSQVSFKMSSLQAADTAVYYCAR | 1C1 | 563 |
| RVTISVDNSKSQVSFKMSSLTAQDTAVYYCAR | 1C1 | 564 |
| RVTISVDNSKSQVSFKMSSVQAQDTAVYYCAR | 1C1 | 565 |
| RVTISVDNSKSQVSFKLSSLQAQDTAVYYCAR | 1C1 | 566 |
| RVTISVDNSKSQVSLKMSSLQAQDTAVYYCAR | 1C1 | 567 |
| RVTISVDNSKSQFSFKMSSLQAQDTAVYYCAR | 1C1 | 568 |
| RVTISVDNSKNQVSFKMSSLQAQDTAVYYCAR | 1C1 | 569 |
| RVTISVDTSKSQVSFKMSSLQAQDTAVYYCAR | 1C1 | 570 |
| RLTISKDNSKSQVSFKMSSLTAADTAVYYCAR | 1C1 | 571 |
| RLTISKDNSKSQVSFKMSSVQAADTAVYYCAR | 1C1 | 572 |
| RLTISKDNSKSQVSFKMSSVTAQDTAVYYCAR | 1C1 | 573 |
| RLTISKDNSKSQVSFKLSSLQAADTAVYYCAR | 1C1 | 574 |
| RLTISKDNSKSQVSFKLSSLTAQDTAVYYCAR | 1C1 | 575 |
| RLTISKDNSKSQVSFKLSSVQAQDTAVYYCAR | 1C1 | 576 |

-

| | | |
|---|---|---|
| RLTISKDNSKSQVSLKMSSLQAADTAVYYCAR | 1C1 | 577 |
| RLTISKDNSKSQVSLKMSSLTAQDTAVYYCAR | 1C1 | 578 |
| RLTISKDNSKSQVSLKMSSVQAQDTAVYYCAR | 1C1 | 579 |
| RLTISKDNSKSQVSLKLSSLQAQDTAVYYCAR | 1C1 | 580 |
| RLTISKDNSKSQFSFKMSSLQAADTAVYYCAR | 1C1 | 581 |
| RLTISKDNSKSQFSFKMSSLTAQDTAVYYCAR | 1C1 | 582 |
| RLTISKDNSKSQFSFKMSSVQAQDTAVYYCAR | 1C1 | 583 |
| RLTISKDNSKSQFSFKLSSLQAQDTAVYYCAR | 1C1 | 584 |
| RLTISKDNSKSQFSLKMSSLQAQDTAVYYCAR | 1C1 | 585 |
| RLTISKDNSKNQVSFKMSSLQAADTAVYYCAR | 1C1 | 586 |
| RLTISKDNSKNQVSFKMSSLTAQDTAVYYCAR | 1C1 | 587 |
| RLTISKDNSKNQVSFKMSSVQAQDTAVYYCAR | 1C1 | 588 |
| RLTISKDNSKNQVSFKLSSLQAQDTAVYYCAR | 1C1 | 589 |
| RLTISKDNSKNQVSLKMSSLQAQDTAVYYCAR | 1C1 | 590 |
| RLTISKDNSKNQFSFKMSSLQAQDTAVYYCAR | 1C1 | 591 |
| RLTISKDTSKSQVSFKMSSLQAADTAVYYCAR | 1C1 | 592 |
| RLTISKDTSKSQVSFKMSSLTAQDTAVYYCAR | 1C1 | 593 |
| RLTISKDTSKSQVSFKMSSVQAQDTAVYYCAR | 1C1 | 594 |
| RLTISKDTSKSQVSFKLSSLQAQDTAVYYCAR | 1C1 | 595 |
| RLTISKDTSKSQVSLKMSSLQAQDTAVYYCAR | 1C1 | 596 |
| RLTISKDTSKSQFSFKMSSLQAQDTAVYYCAR | 1C1 | 597 |
| RLTISKDTSKNQVSFKMSSLQAQDTAVYYCAR | 1C1 | 598 |
| RLTISVDNSKSQVSFKMSSLQAADTAVYYCAR | 1C1 | 599 |
| RLTISVDNSKSQVSFKMSSLTAQDTAVYYCAR | 1C1 | 600 |
| RLTISVDNSKSQVSFKMSSVQAQDTAVYYCAR | 1C1 | 601 |
| RLTISVDNSKSQVSFKLSSLQAQDTAVYYCAR | 1C1 | 602 |
| RLTISVDNSKSQVSLKMSSLQAQDTAVYYCAR | 1C1 | 603 |
| RLTISVDNSKSQFSFKMSSLQAQDTAVYYCAR | 1C1 | 604 |
| RLTISVDNSKNQVSFKMSSLQAQDTAVYYCAR | 1C1 | 605 |
| RLTISVDTSKSQVSFKMSSLQAQDTAVYYCAR | 1C1 | 606 |
| RVTISKDNSKSQVSFKMSSLQAADTAVYYCAR | 1C1 | 607 |
| RVTISKDNSKSQVSFKMSSLTAQDTAVYYCAR | 1C1 | 608 |
| RVTISKDNSKSQVSFKMSSVQAQDTAVYYCAR | 1C1 | 609 |
| RVTISKDNSKSQVSFKLSSLQAQDTAVYYCAR | 1C1 | 610 |
| RVTISKDNSKSQVSLKMSSLQAQDTAVYYCAR | 1C1 | 611 |
| RVTISKDNSKSQFSFKMSSLQAQDTAVYYCAR | 1C1 | 612 |
| RVTISKDNSKNQVSFKMSSLQAQDTAVYYCAR | 1C1 | 613 |
| RVTISKDTSKSQVSFKMSSLQAQDTAVYYCAR | 1C1 | 614 |
| RVTISVDNSKSQVSFKMSSLQAQDTAVYYCAR | 1C1 | 615 |
| RLTISKDNSKSQVSFKMSSLQAADTAVYYCAR | 1C1 | 616 |
| RLTISKDNSKSQVSFKMSSLTAQDTAVYYCAR | 1C1 | 617 |
| RLTISKDNSKSQVSFKMSSVQAQDTAVYYCAR | 1C1 | 618 |
| RLTISKDNSKSQVSFKLSSLQAQDTAVYYCAR | 1C1 | 619 |
| RLTISKDNSKSQVSLKMSSLQAQDTAVYYCAR | 1C1 | 620 |
| RLTISKDNSKSQFSFKMSSLQAQDTAVYYCAR | 1C1 | 621 |
| RLTISKDNSKNQVSFKMSSLQAQDTAVYYCAR | 1C1 | 622 |
| RLTISKDTSKSQVSFKMSSLQAQDTAVYYCAR | 1C1 | 623 |
| RLTISVDNSKSQVSFKMSSLQAQDTAVYYCAR | 1C1 | 624 |
| RVTISKDNSKSQVSFKMSSLQAQDTAVYYCAR | 1C1 | 625 |
| RLTISKDNSKSQVSFKMSSLQAQDTAVYYCAR | 1C1 | 626 |
| RVTISRDTSKNQFSLKLSSVTAADTAVYYCAR | 1C1 | 627 |
| RLTISRDTSKNQFSLKLSSVTAADTAVYYCAR | 1C1 | 628 |
| RVTISRDTSKSQFSLKLSSVTAADTAVYYCAR | 1C1 | 629 |
| RVTISRDTSKNQVSLKLSSVTAADTAVYYCAR | 1C1 | 630 |
| RVTISRDTSKNQFSFKLSSVTAADTAVYYCAR | 1C1 | 631 |
| RLTISRDTSKSQFSLKLSSVTAADTAVYYCAR | 1C1 | 632 |
| RLTISRDTSKNQVSLKLSSVTAADTAVYYCAR | 1C1 | 633 |
| RLTISRDTSKNQFSFKLSSVTAADTAVYYCAR | 1C1 | 634 |
| RVTISRDTSKSQVSLKLSSVTAADTAVYYCAR | 1C1 | 635 |
| RVTISRDTSKSQFSFKLSSVTAADTAVYYCAR | 1C1 | 636 |
| RVTISRDTSKNQVSFKLSSVTAADTAVYYCAR | 1C1 | 637 |
| RLTISRDTSKSQVSLKLSSVTAADTAVYYCAR | 1C1 | 638 |
| RLTISRDTSKSQFSFKLSSVTAADTAVYYCAR | 1C1 | 639 |
| RLTISRDTSKNQVSFKLSSVTAADTAVYYCAR | 1C1 | 640 |
| RVTISRDTSKSQVSFKLSSVTAADTAVYYCAR | 1C1 | 641 |
| RLTISRDTSKSQVSFKLSSVTAADTAVYYCAR | 1C1 | 642 |
| RVTITADESTSTAYMELSSLRSEDTAVYYCAR | 3P10, 5F12, | 643 |
| | 25M22, 17J16 | |
| RFTITADESTSTAYMELSSLRSEDTAVYYCAR | 3P10 | 644 |
| RVTFTADESTSTAYMELSSLRSEDTAVYYCAR | 3P10 | 645 |
| RVTITLDESTSTAYMELSSLRSEDTAVYYCAR | 3P10 | 646 |
| RVTITADESTSTAYMELSNLRSEDTAVYYCAR | 3P10 | 647 |
| RVTITADESTSTAYMELSSLRSEDTAVFYCAR | 3P10 | 648 |
| RFTFTADESTSTAYMELSSLRSEDTAVYYCAR | 3P10 | 649 |
| RFTITLDESTSTAYMELSSLRSEDTAVYYCAR | 3P10 | 650 |
| RFTITADESTSTAYMELSNLRSEDTAVYYCAR | 3P10 | 651 |
| RFTITADESTSTAYMELSSLRSEDTAVFYCAR | 3P10 | 652 |
| RVTFTLDESTSTAYMELSSLRSEDTAVYYCAR | 3P10 | 653 |
| RVTFTADESTSTAYMELSNLRSEDTAVYYCAR | 3P10 | 654 |
| RVTFTADESTSTAYMELSSLRSEDTAVFYCAR | 3P10 | 655 |
| RVTITLDESTSTAYMELSNLRSEDTAVYYCAR | 3P10 | 656 |
| RVTITLDESTSTAYMELSSLRSEDTAVFYCAR | 3P10 | 657 |
| RVTITADESTSTAYMELSNLRSEDTAVFYCAR | 3P10 | 658 |
| RFTFTLDESTSTAYMELSSLRSEDTAVYYCAR | 3P10 | 659 |
| RFTFTADESTSTAYMELSNLRSEDTAVYYCAR | 3P10 | 660 |
| RFTFTADESTSTAYMELSSLRSEDTAVFYCAR | 3P10 | 661 |
| RVTFTLDESTSTAYMELSNLRSEDTAVYYCAR | 3P10 | 662 |
| RVTFTLDESTSTAYMELSSLRSEDTAVFYCAR | 3P10 | 663 |
| RVTFTADESTSTAYMELSNLRSEDTAVFYCAR | 3P10 | 664 |
| RVTITLDESTSTAYMELSNLRSEDTAVFYCAR | 3P10 | 665 |
| RFTFTLDESTSTAYMELSNLRSEDTAVYYCAR | 3P10 | 666 |
| RFTFTLDESTSTAYMELSSLRSEDTAVFYCAR | 3P10 | 667 |
| RFTFTADESTSTAYMELSNLRSEDTAVFYCAR | 3P10 | 668 |
| RVTFTLDESTSTAYMELSNLRSEDTAVFYCAR | 3P10 | 669 |
| RFTFTLDESTSTAYMELSNLRSEDTAVFYCAR | 3P10 | 670 |
| RVTLTADTSTDTAYMELSSLRSEDTAVYFCAR | 3P10 | 671 |
| RFTLTADTSTDTAYMELSSLRSEDTAVYFCAR | 3P10 | 672 |
| RVTFTADTSTDTAYMELSSLRSEDTAVYFCAR | 3P10 | 673 |
| RVTLTADTSTDTAYLELSSLRSEDTAVYFCAR | 3P10 | 674 |
| RFTFTADTSTDTAYMELSSLRSEDTAVYFCAR | 3P10 | 675 |
| RFTLTADTSTDTAYLELSSLRSEDTAVYFCAR | 3P10 | 676 |
| RVTFTADTSTDTAYLELSSLRSEDTAVYFCAR | 3P10 | 677 |
| RFTFTADTSTDTAYLELSSLRSEDTAVYFCAR | 3P10 | 678 |
| RATITADESTSTAYMELSSLRSEDTAVYYCAR | 5F12, 25M22, | 679 |
| | 17J16 | |
| RVTLTADESTSTAYMELSSLRSEDTAVYYCAR | 5F12, 25M22, | 680 |
| | 17J16 | |
| RVTITADKSTSTAYMELSSLRSEDTAVYYCAR | 5F12, 25M22 | 681 |
| RATLTADESTSTAYMELSSLRSEDTAVYYCAR | 5F12, 25M22, | 682 |
| | 17J16 | |
| RATITADKSTSTAYMELSSLRSEDTAVYYCAR | 5F12, 25M22 | 683 |
| RVTLTADKSTSTAYMELSSLRSEDTAVYYCAR | 5F12, 25M22 | 684 |
| RATLTADKSTSTAYMELSSLRSEDTAVYYCAR | 5F12, 25M22 | 685 |
| RATITADESTSTAYMELSSLRSEDTAVYYCAR | 17J16 | 686 |
| RVTITADESSSTAYMELSSLRSEDTAVYYCAR | 17J16 | 687 |
| RVTITADESTSTAYLELSSLRSEDTAVYYCAR | 17J16 | 688 |
| RVTITADESTSTAYMELSRLRSEDTAVYYCAR | 17J16 | 689 |
| RATITADESSSTAYMELSSLRSEDTAVYYCAR | 17J16 | 690 |
| RATITADESTSTAYLELSSLRSEDTAVYYCAR | 17J16 | 691 |
| RATITADESTSTAYMELSRLRSEDTAVYYCAR | 17J16 | 692 |
| RVTLTADESSSTAYMELSSLRSEDTAVYYCAR | 17J16 | 693 |
| RVTLTADESTSTAYLELSSLRSEDTAVYYCAR | 17J16 | 694 |
| RVTLTADESTSTAYMELSRLRSEDTAVYYCAR | 17J16 | 695 |
| RVTITADESSSTAYLELSSLRSEDTAVYYCAR | 17J16 | 696 |
| RVTITADESSSTAYMELSRLRSEDTAVYYCAR | 17J16 | 697 |
| RVTITADESTSTAYLELSRLRSEDTAVYYCAR | 17J16 | 698 |
| RATLTADESSSTAYMELSSLRSEDTAVYYCAR | 17J16 | 699 |
| RATLTADESTSTAYLELSSLRSEDTAVYYCAR | 17J16 | 700 |
| RATLTADESTSTAYMELSRLRSEDTAVYYCAR | 17J16 | 701 |
| RATITADESSSTAYLELSSLRSEDTAVYYCAR | 17J16 | 702 |
| RATITADESSSTAYMELSRLRSEDTAVYYCAR | 17J16 | 703 |
| RATITADESTSTAYLELSRLRSEDTAVYYCAR | 17J16 | 704 |
| RVTLTADESSSTAYLELSSLRSEDTAVYYCAR | 17J16 | 705 |
| RVTLTADESSSTAYMELSRLRSEDTAVYYCAR | 17J16 | 706 |
| RVTLTADESTSTAYLELSRLRSEDTAVYYCAR | 17J16 | 707 |
| RVTITADESSSTAYLELSRLRSEDTAVYYCAR | 17J16 | 708 |
| RATLTADESSSTAYLELSSLRSEDTAVYYCAR | 17J16 | 709 |
| RATLTADESSSTAYMELSRLRSEDTAVYYCAR | 17J16 | 710 |
| RATLTADESTSTAYLELSRLRSEDTAVYYCAR | 17J16 | 711 |
| RATITADESSSTAYLELSRLRSEDTAVYYCAR | 17J16 | 712 |
| RVTLTADESSSTAYLELSRLRSEDTAVYYCAR | 17J16 | 713 |
| RATLTADESSSTAYLELSRLRSEDTAVYYCAR | 17J16 | 714 |
| RVTITRDTSASTAYMELSSLRSEDTAVYYCAR | 5F 12 | 715 |
| RATITRDESASTAYMELSSLRSEDTAVYYCAR | 5F12 | 716 |
| RVTLTRDESASTAYMELSSLRSEDTAVYYCAR | 5F12 | 717 |
| RVTITRDKSASTAYMELSSLRSEDTAVYYCAR | 5F12 | 718 |
| RATLTRDESASTAYMELSSLRSEDTAVYYCAR | 5F12 | 719 |
| RATITRDKSASTAYMELSSLRSEDTAVYYCAR | 5F12 | 720 |
| RVTLTRDKSASTAYMELSSLRSEDTAVYYCAR | 5F12 | 721 |
| RATLTRDKSASTAYMELSSLRSEDTAVYYCAR | 5F12 | 722 |
| QVTISADKSISTAYLQWSSLKASDTAMYYCAR | 25M22 | 723 |
| QATISADKSISTAYLQWSSLKASDTAMYYCAR | 25M22 | 724 |
| QVTLSADKSISTAYLQWSSLKASDTAMYYCAR | 25M22 | 725 |
| QATLSADKSISTAYLQWSSLKASDTAMYYCAR | 25M22 | 726 |

VH Framework 4 (FR4)

| WGQGTLVTVSS | 1C1, 3P10, 5F12 | 727 |
|---|---|---|
| WGQGTTVTVSS | 3P10, 25M22, | 728 |
| | 17J16 | |
| | Humanized | SEQ |
| VL | Clone | ID NO: |

VL Framework 1 (FR1)

| | | |
|---|---|---|
| DVVMTQSPLSLPVTLGQPASISC | 1C1, 3P10, 5F12, | 729 |
| | 25M22, 17J16 | |
| DVVLTQSPLSLPVTLGQPASISC | 1C1, 3P10, 5F12, | 730 |
| | 25M22, 17J16 | |
| DVVLTQSPLSLPVTLGDPASISC | 1C1 | 731 |
| DVVLTQSPLSLPVTLGDPASISC | 1C1 | 732 |
| DIVMTQSPLSLPVTLGQPASISC | 3P10, 5F12 | 733 |
| DIVLTQSPLSLPVTLGQPASISC | 3P10, 5F12 | 734 |
| DVAMTQSPLSLPVTLGQPASISC | 17J16 | 735 |
| DVALTQSPLSLPVTLGQPASISC | 17J16 | 736 |
| DVVLTQTPLSLPVSPGDQASISC | 1C1 | 737 |
| DIVMTQTPLSLPVSPGDQASISC | 1C1 | 738 |
| DIVMTQTPLSLPVSPGDQASISC | 1C1 | 739 |
| DIVMTQTPLSLPVSPGDQASISC | 1C1 | 740 |
| DIELTQSPASLAVSLGQRATISC | 3P10 | 741 |
| DIVLTQSPASLAVSLGQRATISC | 3P10 | 742 |
| DIVMTQSPDSLAVSLGERATINC | 5F 12 | 743 |
| DIVLTQSPDSLAVSLGERATINC | 5F12 | 744 |
| DIQMTQSPSSLSASVGDRVTITC | 5F12 | 745 |
| DIQLTQSPSSLSASVGDRVTITC | 5F12 | 746 |
| EIVLTQSPATLSLSPGERATLSC | 5F 12 | 747 |
| EIVLTQSPATLSVSPGERATLSC | 5F12 | 748 |
| EIVLTQSPGTLSLSPGERATLSC | 25M22 | 749 |
| EVVLTQSPGTLSLSPGERATLSC | 25M22 | 750 |

VL Framework 2 (FR2)

| | | |
|---|---|---|
| WFQQRPGQSPRRLIY | 1C1, 3P10, 5F12, | 751 |
| | 25M22, 17J16 | |
| WYQQRPGQSPRRLIY | 1C1, 5F12, 25M22 | 752 |
| WFQQKPGQSPRRLIY | 1C1 | 753 |
| WFQQRPGQSPKRLIY | 1C1, 17J16 | 754 |
| WFQQRPGQSPRLLIY | 1C1, 3P10, 5F12, | 755 |
| | 25M22 | |
| WYQQKPGQSPRRLIY | 1C1 | 756 |
| WYQQRPGQSPKRLIY | 1C1 | 757 |
| WYQQRPGQSPRLLIY | 1C1, 5F12, 25M22 | 758 |
| WFQQKPGQSPKRLIY | 1C1 | 759 |
| WFQQKPGQSPRLLIY | 1C1 | 760 |
| WFQQRPGQSPKLLIY | 1C1 | 761 |
| WYQQKPGQSPKRLIY | 1C1 | 762 |
| WYQQKPGQSPRLLIY | 1C1 | 763 |
| WYQQRPGQSPKLLIY | 1C1 | 764 |
| WFQQKPGQSPKLLIY | 1C1 | 765 |
| WYQQKPGQSPKLLIY | 1C1 | 766 |
| WLQQRPGQSPRRLIY | 17J16 | 767 |
| WLQQRPGQSPKRLIY | 17J16 | 768 |
| WFQQRPGQSPRRLIF | 25M22 | 769 |
| WYQQRPGQSPRRLIF | 25M22 | 770 |
| WFQQRPGQSPRLLIF | 25M22 | 771 |
| WYQQRPGQSPRLLIF | 25M22 | 772 |
| WYLQKPGQSPKLLIY | 1C1 | 773 |
| WYQQKPGQPPKLLIY | 3P10, 5F12 | 774 |
| WYQQKPGKAPKLLIY | 5F12 | 775 |
| WYQQKPGQAPRLLIY | 5F12, 25M22 | 776 |
| WYQQKPGQAPRLLIF | 25M22 | 777 |

VL Framework 3 (FR3)

| | | |
|---|---|---|
| GVPDRFSGSGSGTDFTLKISRVEAEDVGVYYC | 1C1, 3P10, 5F12, | 778 |
| | 25M22, 17J16 | |
| GVPDRFSGSGSGADFTLKISRVEAEDVGVYYC | 17J16 | 779 |
| GVPDRFSGSGSGTDFTLKISRVEAEDVGVYFC | 1C1, 3P10 | 780 |
| GVPDRFSGSGSRTDFTLKISRVEAEDVGVYYC | 5F12 | 781 |
| GVPDRFSGSGSGTDFTLTISSLQAEDVAVYYC | 5F12 | 782 |
| GVPDRFSGSGSRTDFTLTISSLQAEDVAVYYC | 5F12 | 783 |
| GVPDRFSGSGSGTDFTLTISSVQAEDVAVYYC | 5F12 | 784 |
| GVPDRFSGSGSRTDFTLTISSVQAEDVAVYYC | 5F12 | 785 |
| GVPSRFSGSGSGTDFTLTISSLQPEDFATYYC | 5F12 | 786 |
| GVPSRFSGSGSGTDFTLTISSVQPEDFATYYC | 5F12 | 787 |
| GIPARFSGSGSGTDFTLTISSLEPEDFAVYYC | 5F12 | 788 |
| GVPARFSGSGSGTDFTLTISSLEPEDFAVYYC | 5F12 | 789 |
| GIPARFSGSGSGTDFTLTISSVEPEDFAVYYC | 5F12 | 790 |
| GVPARFSGSGSGTDFTLTISSVEPEDFAVYYC | 5F12 | 791 |
| GIPDRFSGSGSGTDFTLTISRLEPEDFAVYYC | 25M22 | 792 |

VL Framework 4 (FR4)

| | | |
|---|---|---|
| FGGGTKVEIK | 1C1, 3P10, 5F12, | 793 |
| FGSGTKLEIK | 1C1, 3P10 | 794 |

[symbol]

indicates data missing or illegible when filed

[0285] In certain embodiments, an antibody or fragment thereof described herein comprises a VH region that comprises: (1) a VH FR1 having an amino acid sequence selected from SEQ ID NOS: 570-578; (2) a VH FR2 having an amino acid sequence selected from SEQ ID NOS: 579-602; (3) a VH FR3 having an amino acid sequence selected from SEQ ID NOS: 603-1726; and/or (4) a VH FR4 having an amino acid selected from SEQ ID NOS: 1727-1728. Accordingly, in some aspects, the humanized antibody comprises a VH region that includes a VH FR1 having an amino acid sequence selected from SEQ ID NOS: 570-578. In some aspects, the humanized antibody comprises a VH region that includes a VH FR2 having an amino acid sequence selected from SEQ ID NOS: 579-602. In some aspects, the humanized antibody comprises a VH region that includes a VH FR3 having an amino acid sequence selected from SEQ ID NOS: 603-1726. In some aspects, the humanized antibody comprises a VH region that includes a VH FR4 having an amino acid selected from SEQ ID NOS: 1727-1728.

[0286] In certain embodiments, an antibody or fragment thereof described herein comprises a VL region that comprises: (1) a VL FR1 having an amino acid sequence selected from SEQ ID NOS: 1729-1750; (2) a VL FR2 having an amino acid sequence selected from SEQ ID NOS: 1751-1777; (3) a VL FR3 having an amino acid sequence selected from SEQ ID NOS: 1778-1792; and/or (4) a VL FR4 having an amino acid selected from SEQ ID NOS: 1793-1794. Accordingly, in some aspects, the humanized antibody comprises a VL region that includes a VL FR1 having an amino acid sequence selected from SEQ ID NOS: 1729-1750. In some aspects, the humanized antibody comprises a VL region that includes a VL FR2 having an amino acid sequence selected from SEQ ID NOS: 1751-1777. In some aspects, the humanized antibody comprises a VL region that includes a VL FR3 having an amino acid sequence selected from SEQ ID NOS: 1778-1792. In some aspects, the humanized antibody comprises a VL region that includes a VL FR4 having an amino acid selected from SEQ ID NOS: 1793-1794.

[0287] In certain embodiments, an antibody or fragment thereof described herein comprises a VH region and a VL region, wherein the VH region further comprises: (1) a VH FR1 having an amino acid sequence selected from SEQ ID NOS: 570-578; (2) a VH FR2 having an amino acid sequence selected from SEQ ID NOS: 579-602; (3) a VH FR3 having an amino acid sequence selected from SEQ ID NOS: 603-1726; and/or (4) a VH FR4 having an amino acid sequence of SEQ ID NOS: 1727-1728; and wherein the VL region further comprises: (1) a VL FR1 having an amino acid sequence selected from SEQ ID NOS: 1729-1750; (2) a VL FR2 having an amino acid sequence selected from SEQ ID NOS: 1751-1777; (3) a VL FR3 having an amino acid sequence selected from SEQ ID NOS: 1778-1792; and/or (4) a VL FR4 having an amino acid selected from SEQ ID NOS: 1793-1794.

[0288] Also provided herein are antibodies comprising one or more (e.g., one, two, three or four) VH FRs and one or more (e.g., one, two, three or four) VL FRs listed in Table 25. In particular, provided herein is an antibody comprising: a VH FR1 (SEQ ID NOS: 570-578) and a VL FR1 (SEQ ID NOS: 1729-1750); a VH FR1 (SEQ ID NOS: 570-578) and a VL FR2 (SEQ ID NOS: 1751-1777); a VH FR1 (SEQ ID NOS: 570-578) and a VL FR3 (SEQ ID NOS: 1778-1792); a VH FR1 (SEQ ID NOS: 570-578) and a VL FR4 (SEQ ID NOS: 1793-1794); a VH FR2 (SEQ ID NOS: 579-602) and a VL FR1 (SEQ ID NOS: 1729-1750); a VH FR2 (SEQ ID NOS: 579-602) and a VL FR2 (SEQ ID NOS: 1751-1777); a VH FR2 (SEQ ID NOS: 579-602) and a VL FR3 (SEQ ID NOS: 1778-1792); a VH FR2 (SEQ ID NOS: 579-602) and a VL FR4 (SEQ ID NOS: 1793-1794); a VH FR3 (SEQ ID NOS: 603-1726) and a VL FR1 (SEQ ID NOS: 1729-1750); a VH FR3 (SEQ ID NOS: 603-1726) and a VL FR2 (SEQ ID NOS: 1751-1777); a VH FR3 (SEQ ID NOS: 603-1726) and a VL FR3 (SEQ ID NOS: 1778-1792); a VH FR3 (SEQ ID NOS: 603-1726) and a VL FR4 (SEQ ID NOS: 1793-1794); a VH FR4 (SEQ ID NOS: 1727-1728) and a VL FR1 (SEQ ID NOS: 1729-1750); a VH FR4 (SEQ ID NOS: 1727-1728) and a VL FR2 (SEQ ID NOS: 1751-1777); a VH FR4 (SEQ ID NOS: 1727-1728) and a VL FR3 (SEQ ID NOS: 1778-1792); a VH FR4 (SEQ ID NOS: 1727-1728) and a VL FR4 (SEQ ID NOS: 1793-1794); a VH FR1 (SEQ ID NOS: 570-578), a VH FR2 (SEQ ID NOS: 579-602) and a VL FR1 (SEQ ID NOS: 1729-1750); a VH FR1 (SEQ ID NOS: 570-578), a VH FR2 (SEQ ID NOS: 579-602) and a VL FR2 (SEQ ID NOS: 1751-1777); a VH FR1 (SEQ ID NOS: 570-578), a VH FR2 (SEQ ID NOS: 579-602) and a VL FR3 (SEQ ID NOS: 1778-1792); a VH FR1 (SEQ ID NOS: 570-578), a VH FR2 (SEQ ID NOS: 579-602) and a VL FR4 (SEQ ID NOS: 1793-1794); a VH FR2 (SEQ ID NOS: 579-602), a VH FR3 (SEQ ID NOS: 603-1726) and a VL FR1 (SEQ ID NOS: 1729-1750); a VH FR2 (SEQ ID NOS: 579-602), a VH FR3 (SEQ ID NOS: 603-1726) and a VL FR2 (SEQ ID NOS: 1751-1777); a VH FR2 (SEQ ID NOS: 579-602), a VH FR3 (SEQ ID NOS: 603-1726) and a VL FR3 (SEQ ID NOS: 1778-1792); a VH FR2 (SEQ ID NOS: 579-602), a VH FR3 (SEQ ID NOS: 603-1726) and a VL FR4 (SEQ ID NOS: 1793-1794); a VH FR1 (SEQ ID NOS: 570-578), a VL FR1 (SEQ ID NOS: 1729-1750) and a VL FR2 (SEQ ID NOS: 1751-1777); a VH FR1 (SEQ ID NOS: 570-578), a VL FR1 (SEQ ID NOS: 1729-1750) and a VL FR3 (SEQ ID NOS: 1778-1792); a VH FR1 (SEQ ID NOS: 570-578), a VL FR1 (SEQ ID NOS: 1729-1750) and a VL FR4 (SEQ ID NOS: 1793-1794); a VH FR1 (SEQ ID NOS: 570-578), a VL FR2 (SEQ ID NOS: 1751-1777) and a VL FR3 (SEQ ID NOS: 1778-1792); a VH FR1 (SEQ ID NOS: 570-578), a VL FR2 (SEQ ID NOS: 1751-1777) and a VL FR4 (SEQ ID NOS: 1793-1794); a VH FR2 (SEQ ID NOS: 579-602), a VL FR1 (SEQ ID NOS: 1729-1750) and a VL FR2 (SEQ ID NOS: 1751-1777); a VH FR2 (SEQ ID NOS: 579-602), a VL FR1 (SEQ ID NOS: 1729-1750) and a VL FR3 (SEQ ID NOS: 1778-1792); a VH FR2 (SEQ ID NOS: 579-602), a VL FR1 (SEQ ID NOS: 1729-1750) and a VL FR4 (SEQ ID NOS: 1793-1794); a VH FR2 (SEQ ID NOS: 579-602), a VL FR2 (SEQ ID NOS: 1751-1777) and a VL FR3 (SEQ ID NOS: 1778-1792); a VH FR2 (SEQ ID NOS: 579-602), a VL FR2 (SEQ ID NOS: 1751-1777) and a VL FR4 (SEQ ID NOS: 1793-1794); a VH FR3 (SEQ ID NOS: 603-1726), a VL FR1 (SEQ ID NOS: 1729-1750) and a VL FR2 (SEQ ID NOS: 1751-1777); a VH FR3 (SEQ ID NOS: 603-1726), a VL FR1 (SEQ ID NOS: 1729-1750) and a VL FR3 (SEQ ID NOS: 1778-1792); a VH FR3 (SEQ ID NOS: 603-1726), a VL FR1 (SEQ ID NOS: 1729-1750) and a VL FR4 (SEQ ID NOS: 1793-1794); a VH FR3 (SEQ ID NOS: 603-1726), a VL FR2 (SEQ ID NOS: 1751-1777) and a VL FR3 (SEQ ID NOS: 1778-1792); a VH FR3 (SEQ ID NOS: 603-1726), a VL FR2 (SEQ ID NOS: 1751-1777) and a VL FR4 (SEQ ID NOS: 1793-1794); a VH FR4 (SEQ ID NOS: 1727-1728), a VL FR1 (SEQ ID NOS: 1729-1750) and a VL FR2 (SEQ ID NOS: 1751-1777); a VH FR4 (SEQ ID NOS: 1727-1728), a VL FR1 (SEQ ID NOS: 1729-1750) and a VL FR3 (SEQ ID NOS: 1778-1792); a VH FR4 (SEQ ID NOS: 1727-1728), a VL FR1 (SEQ ID NOS: 1729-1750) and a VL FR4 (SEQ ID NOS: 1793-1794); a VH FR4 (SEQ ID NOS: 1727-1728), a VL FR2 (SEQ ID NOS: 1751-1777) and a VL FR3 (SEQ ID NOS: 1778-1792); a VH FR4 (SEQ ID NOS: 1727-1728), a VL FR2 (SEQ ID NOS: 1751-1777) and a VL FR4 (SEQ ID NOS: 1793-1794); a VH FR1 (SEQ ID NOS: 570-578), a VH FR2 (SEQ ID NOS: 579-602), a VH FR3 (SEQ ID NOS: 603-1726) and a VL FR1 (SEQ ID NOS: 1729-1750); a VH FR1 (SEQ ID NOS: 570-578), a VH FR2 (SEQ ID NOS: 579-602), a VH FR3 (SEQ ID NOS: 603-1726) and a VL FR2 (SEQ ID NOS: 1751-1777); a VH FR1 (SEQ ID NOS: 570-578), a VH FR2 (SEQ ID NOS: 579-602), a VH FR3 (SEQ ID NOS: 603-1726) and a VL FR3 (SEQ ID NOS: 1778-1792); a VH FR1 (SEQ ID NOS: 570-578), a VH FR2 (SEQ ID NOS: 579-602), a VH FR3 (SEQ ID NOS: 603-1726) and a VL FR4 (SEQ ID NOS: 1793-1794); a VH FR1 (SEQ ID NOS: 570-578), a VH FR2 (SEQ ID NOS: 579-602), a VH FR4 (SEQ ID NOS: 1727-1728) and a VL FR1 (SEQ ID NOS: 1729-1750); a VH FR1 (SEQ ID NOS: 570-578), a VH FR2 (SEQ ID NOS: 579-602), a VH FR4 (SEQ ID NOS: 1727-1728) and a VL FR2 (SEQ ID NOS: 1751-1777); a VH FR1 (SEQ ID NOS: 570-578), a VH FR2 (SEQ ID NOS: 579-602), a VH FR4 (SEQ ID NOS: 1727-1728) and a VL FR3 (SEQ ID NOS: 1778-1792); a VH FR1 (SEQ ID NOS: 570-578), a VH FR2 (SEQ ID NOS: 579-602), a VH FR4 (SEQ ID NOS: 1727-1728) and a VL FR4 (SEQ ID NOS: 1793-1794); a VH FR1 (SEQ ID NOS: 570-578), a VH FR3 (SEQ ID NOS: 603-1726), a VH FR4 (SEQ ID NOS: 1727-1728) and a VL FR1 (SEQ ID NOS: 1729-1750); a VH FR1 (SEQ ID NOS: 570-578), a VH FR3 (SEQ ID NOS: 603-1726), a VH FR4 (SEQ ID NOS: 1727-1728) and a VL FR2 (SEQ ID NOS: 1751-1777); a VH FR1 (SEQ ID NOS: 570-578), a VH FR3 (SEQ ID NOS: 603-1726), a VH FR4 (SEQ ID NOS: 1727-1728) and a VL FR3 (SEQ ID NOS: 1778-1792); a VH FR1 (SEQ ID NOS: 570-578), a VH FR3 (SEQ ID NOS: 603-1726), a VH FR4 (SEQ ID NOS: 1727-1728) and a VL FR4 (SEQ ID NOS: 1793-1794); a VH FR2 (SEQ ID NOS: 579-602), a VH FR3 (SEQ ID NOS: 603-1726), a VH FR4 (SEQ ID NOS: 1727-1728) and a VL FR1 (SEQ ID NOS: 1729-1750); a VH FR2 (SEQ ID NOS: 579-602), a VH FR3 (SEQ ID NOS: 603-1726), a VH FR4 (SEQ ID NOS: 1727-1728) and a VL FR2 (SEQ ID NOS: 1751-1777); a VH FR2 (SEQ ID NOS: 579-602), a VH FR3 (SEQ ID NOS: 603-1726), a VH FR4 (SEQ ID NOS: 1727-1728) and a VL FR3 (SEQ ID NOS: 1778-1792); a VH FR2 (SEQ ID NOS: 579-602), a VH FR3 (SEQ ID NOS: 603-1726), a VH FR4 (SEQ ID NOS: 1727-1728) and a VL FR4 (SEQ ID NOS: 1793-1794); a VH FR1 (SEQ ID NOS: 570-578), a VH FR2 (SEQ ID NOS: 579-602), a VL FR1 (SEQ ID NOS: 1729-1750) and a VL FR2 (SEQ ID NOS: 1751-1777); a VH FR1 (SEQ ID NOS: 570-578), a VH FR2 (SEQ ID NOS: 579-602), a VL FR1 (SEQ ID NOS: 1729-1750) and a VL FR3 (SEQ ID NOS: 1778-1792); a VH FR1 (SEQ ID NOS: 570-578), a VH FR2 (SEQ ID NOS: 579-602), a VL FR1 (SEQ ID NOS: 1729-1750) and a VL FR4 (SEQ ID NOS: 1793-1794); a VH FR1 (SEQ ID NOS: 570-578), a VH FR3 (SEQ ID NOS: 603-1726), a VL FR1 (SEQ ID NOS: 1729-1750) and a VL FR2 (SEQ ID NOS: 1751-1777); a VH FR1 (SEQ ID NOS: 570-578), a VH FR3 (SEQ ID NOS: 603-1726), a VL FR1 (SEQ ID NOS: 1729-1750) and a VL FR3 (SEQ ID NOS: 1778-1792); a VH FR1 (SEQ ID NOS: 570-578), a VH FR3 (SEQ ID NOS: 603-1726), a VL FR1 (SEQ ID NOS: 1729-1750) and a VL FR4 (SEQ ID NOS: 1793-1794); a VH FR1 (SEQ ID NOS: 570-578), a VH FR4 (SEQ ID NOS: 1727-1728), a VL FR1 (SEQ ID NOS: 1729-1750) and a VL FR2 (SEQ ID NOS: 1751-1777); a VH FR1 (SEQ ID NOS: 570-578), a VH FR4 (SEQ ID NOS: 1727-1728), a VL FR1 (SEQ ID NOS: 1729-1750) and a VL FR3 (SEQ ID NOS: 1778-1792); a VH FR1 (SEQ ID NOS: 570-578), a VH FR4 (SEQ ID NOS: 1727-1728), a VL FR1 (SEQ ID NOS: 1729-1750) and a VL FR4 (SEQ ID NOS: 1793-1794); a VH FR2 (SEQ ID NOS: 579-602), a VH FR3 (SEQ ID NOS: 603-1726), a VL FR1 (SEQ ID NOS: 1729-1750) and a VL FR2 (SEQ ID NOS: 1751-1777); a VH FR2 (SEQ ID NOS: 579-602), a VH FR3 (SEQ ID NOS: 603-1726), a VL FR1 (SEQ ID NOS: 1729-1750) and a VL FR3 (SEQ ID NOS: 1778-1792); a VH FR2 (SEQ ID NOS: 579-602), a VH FR3 (SEQ ID NOS: 603-1726), a VL FR1 (SEQ ID NOS: 1729-1750) and a VL FR4 (SEQ ID NOS: 1793-1794); a VH FR2 (SEQ ID NOS: 579-602), a VH FR4 (SEQ ID NOS: 1727-1728), a VL FR1 (SEQ ID NOS: 1729-1750) and a VL FR2 (SEQ ID NOS: 1751-1777); a VH FR2 (SEQ ID NOS: 579-602), a VH FR4 (SEQ ID NOS: 1727-1728), a VL FR1 (SEQ ID NOS: 1729-1750) and a VL FR3 (SEQ ID NOS: 1778-1792); a VH FR2 (SEQ ID NOS: 579-602), a VH FR4 (SEQ ID NOS: 1727-1728), a VL FR1 (SEQ ID NOS: 1729-1750) and a VL FR4 (SEQ ID NOS: 1793-1794); a VH FR3 (SEQ ID NOS: 603-1726), a VH FR4 (SEQ ID NOS: 1727-1728), a VL FR1 (SEQ ID NOS: 1729-1750) and a VL FR2 (SEQ ID NOS: 1751-1777); a VH FR3 (SEQ ID NOS: 603-1726), a VH FR4 (SEQ ID NOS: 1727-1728), a VL FR1 (SEQ ID NOS: 1729-1750) and a VL FR3 (SEQ ID NOS: 1778-1792); a VH FR3 (SEQ ID NOS: 603-1726), a VH FR4 (SEQ ID NOS: 1727-1728), a VL FR1 (SEQ ID NOS: 1729-1750) and a VL FR4 (SEQ ID NOS: 1793-1794); a VH FR1 (SEQ ID NOS: 570-578), a VH FR2 (SEQ ID NOS: 579-602), a VL FR2 (SEQ ID NOS: 1751-1777) and a VL FR3 (SEQ ID NOS: 1778-1792); a VH FR1 (SEQ ID NOS: 570-578), a VH FR2 (SEQ ID NOS: 579-602), a VL FR2 (SEQ ID NOS: 1751-1777) and a VL FR4 (SEQ ID NOS: 1793-1794); a VH FR1 (SEQ ID NOS: 570-578), a VH FR3 (SEQ ID NOS: 603-1726), a VL FR2 (SEQ ID NOS: 1751-1777) and a VL FR3 (SEQ ID NOS: 1778-1792); a VH FR1 (SEQ ID NOS: 570-578), a VH FR3 (SEQ ID NOS: 603-1726), a VL FR2 (SEQ ID NOS: 1751-1777) and a VL FR4 (SEQ ID NOS: 1793-1794); a VH FR1 (SEQ ID NOS: 570-578), a VH FR4 (SEQ ID NOS: 1727-1728), a VL FR2 (SEQ ID NOS: 1751-1777) and a VL FR3 (SEQ ID NOS: 1778-1792); a VH FR1 (SEQ ID NOS: 570-578), a VH FR4 (SEQ ID NOS: 1727-1728), a VL FR2 (SEQ ID NOS: 1751-1777) and a VL FR4 (SEQ ID NOS: 1793-1794); a VH FR2 (SEQ ID NOS: 579-602), a VH FR3 (SEQ ID NOS: 603-1726), a VL FR2 (SEQ ID NOS: 1751-1777) and a VL FR3 (SEQ ID NOS: 1778-1792); a VH FR2 (SEQ ID NOS: 579-602), a VH FR3 (SEQ ID NOS: 603-1726), a VL FR2 (SEQ ID NOS: 1751-1777) and a VL FR4 (SEQ ID NOS: 1793-1794); a VH FR2 (SEQ ID NOS: 579-602), a VH FR4 (SEQ ID NOS: 1727-1728), a VL FR2 (SEQ ID NOS: 1751-1777) and a VL FR3 (SEQ ID NOS: 1778-1792); a VH FR2 (SEQ ID NOS: 579-602), a VH FR4 (SEQ ID NOS: 1727-1728), a VL FR2 (SEQ ID NOS: 1751-1777) and a VL FR4 (SEQ ID NOS: 1793-1794); a VH FR3 (SEQ ID NOS: 603-1726), a VH FR4 (SEQ ID NOS: 1727-1728), a VL FR2 (SEQ ID NOS: 1751-1777) and a VL FR3 (SEQ ID NOS: 1778-1792); a VH FR3 (SEQ ID NOS: 603-1726), a VH FR4 (SEQ ID NOS: 1727-1728), a VL FR2 (SEQ ID NOS: 1751-1777) and a VL FR4 (SEQ ID NOS: 1793-1794); a VH FR1 (SEQ ID NOS: 570-578), a VH FR2 (SEQ ID NOS: 579-602), a VL FR3 (SEQ ID NOS: 1778-1792) and a VL FR4 (SEQ ID NOS: 1793-1794); a VH FR1 (SEQ ID NOS: 570-578), a VH FR3 (SEQ ID NOS: 603-1726), a VL FR3 (SEQ ID NOS: 1778-1792) and a VL FR4 (SEQ ID NOS: 1793-1794); a VH FR1 (SEQ ID NOS: 570-578), a VH FR4 (SEQ ID NOS: 1727-1728), a VL FR3 (SEQ ID NOS: 1778-1792) and a VL FR4 (SEQ ID NOS: 1793-1794); a VH FR2 (SEQ ID NOS: 579-602), a VH FR3 (SEQ ID NOS: 603-1726), a VL FR3 (SEQ ID NOS: 1778-1792) and a VL FR4 (SEQ ID NOS: 1793-1794); a VH FR2 (SEQ ID NOS: 579-602), a VH FR4 (SEQ ID NOS: 1727-1728), a VL FR3 (SEQ ID NOS: 1778-1792) and a VL FR4 (SEQ ID NOS: 1793-1794); a VH FR3 (SEQ ID NOS: 603-1726), a VH FR4 (SEQ ID NOS: 1727-1728), a VL FR3 (SEQ ID NOS: 1778-1792) and a VL FR4 (SEQ ID NOS: 1793-1794); a VH FR1 (SEQ ID NOS: 570-578), a VL FR1 (SEQ ID NOS: 1729-1750), a VL FR2 (SEQ ID NOS: 1751-1777) and a VL FR3 (SEQ ID NOS: 1778-1792); a VH FR1 (SEQ ID NOS: 570-578), a VL FR1 (SEQ ID NOS: 1729-1750), a VL FR2 (SEQ ID NOS: 1751-1777) and a VL FR4 (SEQ ID NOS: 1793-1794); a VH FR1 (SEQ ID NOS: 570-578), a VL FR1 (SEQ ID NOS: 1729-1750), a VL FR3 (SEQ ID NOS: 1778-1792) and a VL FR4 (SEQ ID NOS: 1793-1794); a VH FR1 (SEQ ID NOS: 570-578), a VL FR2 (SEQ ID NOS: 1751-1777), a VL FR3 (SEQ ID NOS: 1778-1792) and a VL FR4 (SEQ ID NOS: 1793-1794); a VH FR2 (SEQ ID NOS: 579-602), a VL FR1 (SEQ ID NOS: 1729-1750), a VL FR2 (SEQ ID NOS: 1751-1777) and a VL FR3 (SEQ ID NOS: 1778-1792); a VH FR2 (SEQ ID NOS: 579-602), a VL FR1 (SEQ ID NOS: 1729-1750), a VL FR2 (SEQ ID NOS: 1751-1777) and a VL FR4 (SEQ ID NOS: 1793-1794); a VH FR2 (SEQ ID NOS: 579-602), a VL FR1 (SEQ ID NOS: 1729-1750), a VL FR3 (SEQ ID NOS: 1778-1792) and a VL FR4 (SEQ ID NOS: 1793-1794); a VH FR2 (SEQ ID NOS: 579-602), a VL FR2 (SEQ ID NOS: 1751-1777), a VL FR3 (SEQ ID NOS: 1778-1792) and a VL FR4 (SEQ ID NOS: 1793-1794); a VH FR3 (SEQ ID NOS: 603-1726), a VL FR1 (SEQ ID NOS: 1729-1750), a VL FR2 (SEQ ID NOS: 1751-1777) and a VL FR3 (SEQ ID NOS: 1778-1792); a VH FR3 (SEQ ID NOS: 603-1726), a VL FR1 (SEQ ID NOS: 1729-1750), a VL FR2 (SEQ ID NOS: 1751-1777) and a VL FR4 (SEQ ID NOS: 1793-1794); a VH FR3 (SEQ ID NOS: 603-1726), a VL FR1 (SEQ ID NOS: 1729-1750), a VL FR3 (SEQ ID NOS: 1778-1792) and a VL FR4 (SEQ ID NOS: 1793-1794); a VH FR3 (SEQ ID NOS: 603-1726), a VL FR2 (SEQ ID NOS: 1751-1777), a VL FR3 (SEQ ID NOS: 1778-1792) and a VL FR4 (SEQ ID NOS: 1793-1794); a VH FR4 (SEQ ID NOS: 1727-1728), a VL FR1 (SEQ ID NOS: 1729-1750), a VL FR2 (SEQ ID NOS: 1751-1777) and a VL FR3 (SEQ ID NOS: 1778-1792); a VH FR4 (SEQ ID NOS: 1727-1728), a VL FR1 (SEQ ID NOS: 1729-1750), a VL FR2 (SEQ ID NOS: 1751-1777) and a VL FR4 (SEQ ID NOS: 1793-1794); a VH FR4 (SEQ ID NOS: 1727-1728), a VL FR1 (SEQ ID NOS: 1729-1750), a VL FR3 (SEQ ID NOS: 1778-1792) and a VL FR4 (SEQ ID NOS: 1793-1794); a VH FR4 (SEQ ID NOS: 1727-1728), a VL FR2 (SEQ ID NOS: 1751-1777), a VL FR3 (SEQ ID NOS: 1778-1792) and a VL FR4 (SEQ ID NOS: 1793-1794); a VH FR1 (SEQ ID NOS: 570-578), a VH FR2 (SEQ ID NOS: 579-602), a VH FR3 (SEQ ID NOS: 603-1726), a VH FR4 (SEQ ID NOS: 1727-1728) and a VL FR1 (SEQ ID NOS: 1729-1750); a VH FR1 (SEQ ID NOS: 570-578), a VH FR2 (SEQ ID NOS: 579-602), a VH FR3 (SEQ ID NOS: 603-1726), a VH FR4 (SEQ ID NOS: 1727-1728) and a VL FR2 (SEQ ID NOS: 1751-1777); a VH FR1 (SEQ ID NOS: 570-578), a VH FR2 (SEQ ID NOS: 579-602), a VH FR3 (SEQ ID NOS: 603-1726), a VH FR4 (SEQ ID NOS: 1727-1728) and a VL FR3 (SEQ ID NOS: 1778-1792); a VH FR1 (SEQ ID NOS: 570-578), a VH FR2 (SEQ ID NOS: 579-602), a VH FR3 (SEQ ID NOS: 603-1726), a VH FR4 (SEQ ID NOS: 1727-1728) and a VL FR4 (SEQ ID NOS: 1793-1794); a VH FR1 (SEQ ID NOS: 570-578), a VH FR2 (SEQ ID NOS: 579-602), a VH FR3 (SEQ ID NOS: 603-1726), a VL FR1 (SEQ ID NOS: 1729-1750) and a VL FR2 (SEQ ID NOS: 1751-1777); a VH FR1 (SEQ ID NOS: 570-578), a VH FR2 (SEQ ID NOS: 579-602), a VH FR3 (SEQ ID NOS: 603-1726), a VL FR1 (SEQ ID NOS: 1729-1750) and a VL FR3 (SEQ ID NOS: 1778-1792); a VH FR1 (SEQ ID NOS: 570-578), a VH FR2 (SEQ ID NOS: 579-602), a VH FR3 (SEQ ID NOS: 603-1726), a VL FR1 (SEQ ID NOS: 1729-1750) and a VL FR4 (SEQ ID NOS: 1793-1794); a VH FR1 (SEQ ID NOS: 570-578), a VH FR2 (SEQ ID NOS: 579-602), a VH FR3 (SEQ ID NOS: 603-1726), a VL FR2 (SEQ ID NOS: 1751-1777) and a VL FR3 (SEQ ID NOS: 1778-1792); a VH FR1 (SEQ ID NOS: 570-578), a VH FR2 (SEQ ID NOS: 579-602), a VH FR3 (SEQ ID NOS: 603-1726), a VL FR2 (SEQ ID NOS: 1751-1777) and a VL FR4 (SEQ ID NOS: 1793-1794); a VH FR1 (SEQ ID NOS: 570-578), a VH FR2 (SEQ ID NOS: 579-602), a VH FR3 (SEQ ID NOS: 603-1726), a VL FR3 (SEQ ID NOS: 1778-1792) and a VL FR4 (SEQ ID NOS: 1793-1794); a VH FR1 (SEQ ID NOS: 570-578), a VH FR2 (SEQ ID NOS: 579-602), a VH FR4 (SEQ ID NOS: 1727-1728), a VL FR1 (SEQ ID NOS: 1729-1750) and a VL FR2 (SEQ ID NOS: 1751-1777); a VH FR1 (SEQ ID NOS: 570-578), a VH FR2 (SEQ ID NOS: 579-602), a VH FR4 (SEQ ID NOS: 1727-1728), a VL FR1 (SEQ ID NOS: 1729-1750) and a VL FR3 (SEQ ID NOS: 1778-1792); a VH FR1 (SEQ ID NOS: 570-578), a VH FR2 (SEQ ID NOS: 579-602), a VH FR4 (SEQ ID NOS: 1727-1728), a VL FR1 (SEQ ID NOS: 1729-1750) and a VL FR4 (SEQ ID NOS: 1793-1794); a VH FR1 (SEQ ID NOS: 570-578), a VH FR2 (SEQ ID NOS: 579-602), a VH FR4 (SEQ ID NOS: 1727-1728), a VL FR2 (SEQ ID NOS: 1751-1777) and a VL FR3 (SEQ ID NOS: 1778-1792); a VH FR1 (SEQ ID NOS: 570-578), a VH FR2 (SEQ ID NOS: 579-602), a VH FR4 (SEQ ID NOS: 1727-1728), a VL FR2 (SEQ ID NOS: 1751-1777) and a VL FR4 (SEQ ID NOS: 1793-1794); a VH FR1 (SEQ ID NOS: 570-578), a VH FR2 (SEQ ID NOS: 579-602), a VH FR4 (SEQ ID NOS: 1727-1728), a VL FR3 (SEQ ID NOS: 1778-1792) and a VL FR4 (SEQ ID NOS: 1793-1794); a VH FR2 (SEQ ID NOS: 579-602), a VH FR3 (SEQ ID NOS: 603-1726), a VH FR4 (SEQ ID NOS: 1727-1728), a VL FR1 (SEQ ID NOS: 1729-1750) and a VL FR2 (SEQ ID NOS: 1751-1777); a VH FR2 (SEQ ID NOS: 579-602), a VH FR3 (SEQ ID NOS: 603-1726), a VH FR4 (SEQ ID NOS: 1727-1728), a VL FR1 (SEQ ID NOS: 1729-1750) and a VL FR3 (SEQ ID NOS: 1778-1792); a VH FR2 (SEQ ID NOS: 579-602), a VH FR3 (SEQ ID NOS: 603-1726), a VH FR4 (SEQ ID NOS: 1727-1728), a VL FR1 (SEQ ID NOS: 1729-1750) and a VL FR4 (SEQ ID NOS: 1793-1794); a VH FR2 (SEQ ID NOS: 579-602), a VH FR3 (SEQ ID NOS: 603-1726), a VH FR4 (SEQ ID NOS: 1727-1728), a VL FR2 (SEQ ID NOS: 1751-1777) and a VL FR3 (SEQ ID NOS: 1778-1792); a VH FR2 (SEQ ID NOS: 579-602), a VH FR3 (SEQ ID NOS: 603-1726), a VH FR4 (SEQ ID NOS: 1727-1728), a VL FR2 (SEQ ID NOS: 1751-1777) and a VL FR4 (SEQ ID NOS: 1793-1794); a VH FR2 (SEQ ID NOS: 579-602), a VH FR3 (SEQ ID NOS: 603-1726), a VH FR4 (SEQ ID NOS: 1727-1728), a VL FR3 (SEQ ID NOS: 1778-1792) and a VL FR4 (SEQ ID NOS: 1793-1794); a VH FR1 (SEQ ID NOS: 570-578), a VH FR2 (SEQ ID NOS: 579-602), a VL FR1 (SEQ ID NOS: 1729-1750), a VL FR2 (SEQ ID NOS: 1751-1777), and a VL FR3 (SEQ ID NOS: 1778-1792); a VH FR1 (SEQ ID NOS: 570-578), a VH FR2 (SEQ ID NOS: 579-602), a VL FR1 (SEQ ID NOS: 1729-1750), a VL FR2 (SEQ ID NOS: 1751-1777), and a VL FR4 (SEQ ID NOS: 1793-1794); a VH FR1 (SEQ ID NOS: 570-578), a VH FR2 (SEQ ID NOS: 579-602), a VL FR1 (SEQ ID NOS: 1729-1750), a VL FR3 (SEQ ID NOS: 1778-1792), and a VL FR4 (SEQ ID NOS: 1793-1794); a VH FR1 (SEQ ID NOS: 570-578), a VH FR2 (SEQ ID NOS: 579-602), a VL FR2 (SEQ ID NOS: 1751-1777), a VL FR3 (SEQ ID NOS: 1778-1792), and a VL FR4 (SEQ ID NOS: 1793-1794); a VH FR1 (SEQ ID NOS: 570-578), a VH FR3 (SEQ ID NOS: 603-1726), a VL FR1 (SEQ ID NOS: 1729-1750), a VL FR2 (SEQ ID NOS: 1751-1777), and a VL FR3 (SEQ ID NOS: 1778-1792); a VH FR1 (SEQ ID NOS: 570-578), a VH FR3 (SEQ ID NOS: 603-1726), a VL FR1 (SEQ ID NOS: 1729-1750), a VL FR2 (SEQ ID NOS: 1751-1777), and a VL FR4 (SEQ ID NOS: 1793-1794); a VH FR1 (SEQ ID NOS: 570-578), a VH FR3 (SEQ ID NOS: 603-1726), a VL FR1 (SEQ ID NOS: 1729-1750), a VL FR3 (SEQ ID NOS: 1778-1792), and a VL FR4 (SEQ ID NOS: 1793-1794); a VH FR1 (SEQ ID NOS: 570-578), a VH FR3 (SEQ ID NOS: 603-1726), a VL FR2 (SEQ ID NOS: 1751-1777), a VL FR3 (SEQ ID NOS: 1778-1792), and a VL FR4 (SEQ ID NOS: 1793-1794); a VH FR1 (SEQ ID NOS: 570-578), a VH FR4 (SEQ ID NOS: 1727-1728), a VL FR1 (SEQ ID NOS: 1729-1750), a VL FR2 (SEQ ID NOS: 1751-1777), and a VL FR3 (SEQ ID NOS: 1778-1792); a VH FR1 (SEQ ID NOS: 570-578), a VH FR4 (SEQ ID NOS: 1727-1728), a VL FR1 (SEQ ID NOS: 1729-1750), a VL FR2 (SEQ ID NOS: 1751-1777), and a VL FR4 (SEQ ID NOS: 1793-1794); a VH FR1 (SEQ ID NOS: 570-578), a VH FR4 (SEQ ID NOS: 1727-1728), a VL FR1 (SEQ ID NOS: 1729-1750), a VL FR3 (SEQ ID NOS: 1778-1792), and a VL FR4 (SEQ ID NOS: 1793-1794); a VH FR1 (SEQ ID NOS: 570-578), a VH FR4 (SEQ ID NOS: 1727-1728), a VL FR2 (SEQ ID NOS: 1751-1777), a VL FR3 (SEQ ID NOS: 1778-1792), and a VL FR4 (SEQ ID NOS: 1793-1794); a VH FR2 (SEQ ID NOS: 579-602), a VH FR3 (SEQ ID NOS: 603-1726), a VL FR1 (SEQ ID NOS: 1729-1750), a VL FR2 (SEQ ID NOS: 1751-1777), and a VL FR3 (SEQ ID NOS: 1778-1792); a VH FR2 (SEQ ID NOS: 579-602), a VH FR3 (SEQ ID NOS: 603-1726), a VL FR1 (SEQ ID NOS: 1729-1750), a VL FR2 (SEQ ID NOS: 1751-1777), and a VL FR4 (SEQ ID NOS: 1793-1794); a VH FR2 (SEQ ID NOS: 579-602), a VH FR3 (SEQ ID NOS: 603-1726), a VL FR1 (SEQ ID NOS: 1729-1750), a VL FR3 (SEQ ID NOS: 1778-1792), and a VL FR4 (SEQ ID NOS: 1793-1794); a VH FR2 (SEQ ID NOS: 579-602), a VH FR3 (SEQ ID NOS: 603-1726), a VL FR2 (SEQ ID NOS: 1751-1777), a VL FR3 (SEQ ID NOS: 1778-1792), and a VL FR4 (SEQ ID NOS: 1793-1794); a VH FR2 (SEQ ID NOS: 579-602), a VH FR4 (SEQ ID NOS: 1727-1728), a VL FR1 (SEQ ID NOS: 1729-1750), a VL FR2 (SEQ ID NOS: 1751-1777), and a VL FR3 (SEQ ID NOS: 1778-1792); a VH FR2 (SEQ ID NOS: 579-602), a VH FR4 (SEQ ID NOS: 1727-1728), a VL FR1 (SEQ ID NOS: 1729-1750), a VL FR2 (SEQ ID NOS: 1751-1777), and a VL FR4 (SEQ ID NOS: 1793-1794); a VH FR2 (SEQ ID NOS: 579-602), a VH FR4 (SEQ ID NOS: 1727-1728), a VL FR1 (SEQ ID NOS: 1729-1750), a VL FR3 (SEQ ID NOS: 1778-1792), and a VL FR4 (SEQ ID NOS: 1793-1794); a VH FR2 (SEQ ID NOS: 579-602), a VH FR4 (SEQ ID NOS: 1727-1728), a VL FR2 (SEQ ID NOS: 1751-1777), a VL FR3 (SEQ ID NOS: 1778-1792), and a VL FR4 (SEQ ID NOS: 1793-1794); a VH FR3 (SEQ ID NOS: 603-1726), a VH FR4 (SEQ ID NOS: 1727-1728), a VL FR1 (SEQ ID NOS: 1729-1750), a VL FR2 (SEQ ID NOS: 1751-1777), and a VL FR3 (SEQ ID NOS: 1778-1792); a VH FR3 (SEQ ID NOS: 603-1726), a VH FR4 (SEQ ID NOS: 1727-1728), a VL FR1 (SEQ ID NOS: 1729-1750), a VL FR2 (SEQ ID NOS: 1751-1777), and a VL FR4 (SEQ ID NOS: 1793-1794); a VH FR3 (SEQ ID NOS: 603-1726), a VH FR4 (SEQ ID NOS: 1727-1728), a VL FR1 (SEQ ID NOS: 1729-1750), a VL FR3 (SEQ ID NOS: 1778-1792), and a VL FR4 (SEQ ID NOS: 1793-1794); a VH FR3 (SEQ ID NOS: 603-1726), a VH FR4 (SEQ ID NOS: 1727-1728), a VL FR2 (SEQ ID NOS: 1751-1777), a VL FR3 (SEQ ID NOS: 1778-1792), and a VL FR4 (SEQ ID NOS: 1793-1794); a VH FR1 (SEQ ID NOS: 570-578), a VL FR1 (SEQ ID NOS: 1729-1750), a VL FR2 (SEQ ID NOS: 1751-1777), a VL FR3 (SEQ ID NOS: 1778-1792), and a VL FR4 (SEQ ID NOS: 1793-1794); a VH FR2 (SEQ ID NOS: 579-602), a VL FR1 (SEQ ID NOS: 1729-1750), a VL FR2 (SEQ ID NOS: 1751-1777), a VL FR3 (SEQ ID NOS: 1778-1792), and a VL FR4 (SEQ ID NOS: 1793-1794); a VH FR3 (SEQ ID NOS: 603-1726), a VL FR1 (SEQ ID NOS: 1729-1750), a VL FR2 (SEQ ID NOS: 1751-1777), a VL FR3 (SEQ ID NOS: 1778-1792), and a VL FR4 (SEQ ID NOS: 1793-1794); a VH FR4 (SEQ ID NOS: 1727-1728), a VL FR1 (SEQ ID NOS: 1729-1750), a VL FR2 (SEQ ID NOS: 1751-1777), a VL FR3 (SEQ ID NOS: 1778-1792), and a VL FR4 (SEQ ID NOS: 1793-1794); a VH FR1 (SEQ ID NOS: 570-578), a VH FR2 (SEQ ID NOS: 579-602), a VH FR3 (SEQ ID NOS: 603-1726), a VH FR4 (SEQ ID NOS: 1727-1728), VL FR1 (SEQ ID NOS: 1729-1750) and a VL FR2 (SEQ ID NOS: 1751-1777); a VH FR1 (SEQ ID NOS: 570-578), a VH FR2 (SEQ ID NOS: 579-602), a VH FR3 (SEQ ID NOS: 603-1726), a VH FR4 (SEQ ID NOS: 1727-1728), VL FR1 (SEQ ID NOS: 1729-1750) and a VL FR3 (SEQ ID NOS: 1778-1792); a VH FR1 (SEQ ID NOS: 570-578), a VH FR2 (SEQ ID NOS: 579-602), a VH FR3 (SEQ ID NOS: 603-1726), a VH FR4 (SEQ ID NOS: 1727-1728), VL FR1 (SEQ ID NOS: 1729-1750) and a VL FR4 (SEQ ID NOS: 1793-1794); a VH FR1 (SEQ ID NOS: 570-578), a VH FR2 (SEQ ID NOS: 579-602), a VH FR3 (SEQ ID NOS: 603-1726), a VH FR4 (SEQ ID NOS: 1727-1728), VL FR2 (SEQ ID NOS: 1751-1777) and a VL FR3 (SEQ ID NOS: 1778-1792); a VH FR1 (SEQ ID NOS: 570-578), a VH FR2 (SEQ ID NOS: 579-602), a VH FR3 (SEQ ID NOS: 603-1726), a VH FR4 (SEQ ID NOS: 1727-1728), VL FR2 (SEQ ID NOS: 1751-1777) and a VL FR4 (SEQ ID NOS: 1793-1794); a VH FR1 (SEQ ID NOS: 570-578), a VH FR2 (SEQ ID NOS: 579-602), a VH FR3 (SEQ ID NOS: 603-1726), a VH FR4 (SEQ ID NOS: 1727-1728), VL FR3 (SEQ ID NOS: 1778-1792) and a VL FR4 (SEQ ID NOS: 1793-1794); a VH FR1 (SEQ ID NOS: 570-578), a VH FR2 (SEQ ID NOS: 579-602), a VH FR3 (SEQ ID NOS: 603-1726), a VL FR1 (SEQ ID NOS: 1729-1750), VL FR2 (SEQ ID NOS: 1751-1777) and a VL FR3 (SEQ ID NOS: 1778-1792); a VH FR1 (SEQ ID NOS: 570-578), a VH FR2 (SEQ ID NOS: 579-602), a VH FR3 (SEQ ID NOS: 603-1726), a VL FR1 (SEQ ID NOS: 1729-1750), VL FR2 (SEQ ID NOS: 1751-1777) and a VL FR4 (SEQ ID NOS: 1793-1794); a VH FR1 (SEQ ID NOS: 570-578), a VH FR2 (SEQ ID NOS: 579-602), a VH FR3 (SEQ ID NOS: 603-1726), a VL FR1 (SEQ ID NOS: 1729-1750), VL FR3 (SEQ ID NOS: 1778-1792) and a VL FR4 (SEQ ID NOS: 1793-1794); a VH FR1 (SEQ ID NOS: 570-578), a VH FR2 (SEQ ID NOS: 579-602), a VH FR3 (SEQ ID NOS: 603-1726), a VL FR2 (SEQ ID NOS: 1751-1777), VL FR3 (SEQ ID NOS: 1778-1792) and a VL FR4 (SEQ ID NOS: 1793-1794); a VH FR1 (SEQ ID NOS: 570-578), a VH FR2 (SEQ ID NOS: 579-602), a VH FR4 (SEQ ID NOS: 1727-1728), a VL FR1 (SEQ ID NOS: 1729-1750), VL FR2 (SEQ ID NOS: 1751-1777) and a VL FR3 (SEQ ID NOS: 1778-1792); a VH FR1 (SEQ ID NOS: 570-578), a VH FR2 (SEQ ID NOS: 579-602), a VH FR4 (SEQ ID NOS: 1727-1728), a VL FR1 (SEQ ID NOS: 1729-1750), VL FR2 (SEQ ID NOS: 1751-1777) and a VL FR4 (SEQ ID NOS: 1793-1794); a VH FR1 (SEQ ID NOS: 570-578), a VH FR2 (SEQ ID NOS: 579-602), a VH FR4 (SEQ ID NOS: 1727-1728), a VL FR1 (SEQ ID NOS: 1729-1750), VL FR3 (SEQ ID NOS: 1778-1792) and a VL FR4 (SEQ ID NOS: 1793-1794); a VH FR1 (SEQ ID NOS: 570-578), a VH FR2 (SEQ ID NOS: 579-602), a VH FR4 (SEQ ID NOS: 1727-1728), a VL FR2 (SEQ ID NOS: 1751-1777), VL FR3 (SEQ ID NOS: 1778-1792) and a VL FR4 (SEQ ID NOS: 1793-1794); a VH FR1 (SEQ ID NOS: 570-578), a VH FR3 (SEQ ID NOS: 603-1726), a VH FR4 (SEQ ID NOS: 1727-1728), a VL FR1 (SEQ ID NOS: 1729-1750), VL FR2 (SEQ ID NOS: 1751-1777) and a VL FR3 (SEQ ID NOS: 1778-1792); a VH FR1 (SEQ ID NOS: 570-578), a VH FR3 (SEQ ID NOS: 603-1726), a VH FR4 (SEQ ID NOS: 1727-1728), a VL FR1 (SEQ ID NOS: 1729-1750), VL FR2 (SEQ ID NOS: 1751-1777) and a VL FR4 (SEQ ID NOS: 1793-1794); a VH FR1 (SEQ ID NOS: 570-578), a VH FR3 (SEQ ID NOS: 603-1726), a VH FR4 (SEQ ID NOS: 1727-1728), a VL FR1 (SEQ ID NOS: 1729-1750), VL FR3 (SEQ ID NOS: 1778-1792) and a VL FR4 (SEQ ID NOS: 1793-1794); a VH FR1 (SEQ ID NOS: 570-578), a VH FR3 (SEQ ID NOS: 603-1726), a VH FR4 (SEQ ID NOS: 1727-1728), a VL FR2 (SEQ ID NOS: 1751-1777), VL FR3 (SEQ ID NOS: 1778-1792) and a VL FR4 (SEQ ID NOS: 1793-1794); a VH FR2 (SEQ ID NOS: 579-602), a VH FR3 (SEQ ID NOS: 603-1726), a VH FR4 (SEQ ID NOS: 1727-1728), a VL FR1 (SEQ ID NOS: 1729-1750), VL FR2 (SEQ ID NOS: 1751-1777) and a VL FR3 (SEQ ID NOS: 1778-1792); a VH FR2 (SEQ ID NOS: 579-602), a VH FR3 (SEQ ID NOS: 603-1726), a VH FR4 (SEQ ID NOS: 1727-1728), a VL FR1 (SEQ ID NOS: 1729-1750), VL FR2 (SEQ ID NOS: 1751-1777) and a VL FR4 (SEQ ID NOS: 1793-1794); a VH FR2 (SEQ ID NOS: 579-602), a VH FR3 (SEQ ID NOS: 603-1726), a VH FR4 (SEQ ID NOS: 1727-1728), a VL FR1 (SEQ ID NOS: 1729-1750), VL FR3 (SEQ ID NOS: 1778-1792) and a VL FR4 (SEQ ID NOS: 1793-1794); a VH FR2 (SEQ ID NOS: 579-602), a VH FR3 (SEQ ID NOS: 603-1726), a VH FR4 (SEQ ID NOS: 1727-1728), a VL FR2 (SEQ ID NOS: 1751-1777), VL FR3 (SEQ ID NOS: 1778-1792) and a VL FR4 (SEQ ID NOS: 1793-1794); a VH FR1 (SEQ ID NOS: 570-578), a VH FR2 (SEQ ID NOS: 579-602), a VL FR1 (SEQ ID NOS: 1729-1750), a VL FR2 (SEQ ID NOS: 1751-1777), VL FR3 (SEQ ID NOS: 1778-1792) and a VL FR4 (SEQ ID NOS: 1793-1794); a VH FR1 (SEQ ID NOS: 570-578), a VH FR3 (SEQ ID NOS: 603-1726), a VL FR1 (SEQ ID NOS: 1729-1750), a VL FR2 (SEQ ID NOS: 1751-1777), VL FR3 (SEQ ID NOS: 1778-1792) and a VL FR4 (SEQ ID NOS: 1793-1794); a VH FR1 (SEQ ID NOS: 570-578), a VH FR4 (SEQ ID NOS: 1727-1728), a VL FR1 (SEQ ID NOS: 1729-1750), a VL FR2 (SEQ ID NOS: 1751-1777), VL FR3 (SEQ ID NOS: 1778-1792) and a VL FR4 (SEQ ID NOS: 1793-1794); a VH FR2 (SEQ ID NOS: 579-602), a VH FR3 (SEQ ID NOS: 603-1726), a VL FR1 (SEQ ID NOS: 1729-1750), a VL FR2 (SEQ ID NOS: 1751-1777), VL FR3 (SEQ ID NOS: 1778-1792) and a VL FR4 (SEQ ID NOS: 1793-1794); a VH FR2 (SEQ ID NOS: 579-602), a VH FR4 (SEQ ID NOS: 1727-1728), a VL FR1 (SEQ ID NOS: 1729-1750), a VL FR2 (SEQ ID NOS: 1751-1777), VL FR3 (SEQ ID NOS: 1778-1792) and a VL FR4 (SEQ ID NOS: 1793-1794); a VH FR3 (SEQ ID NOS: 603-1726), a VH FR4 (SEQ ID NOS: 1727-1728), a VL FR1 (SEQ ID NOS: 1729-1750), a VL FR2 (SEQ ID NOS: 1751-1777), VL FR3 (SEQ ID NOS: 1778-1792) and a VL FR4 (SEQ ID NOS: 1793-1794); a VH FR1 (SEQ ID NOS: 570-578), a VH FR2 (SEQ ID NOS: 579-602), a VH FR3 (SEQ ID NOS: 603-1726), a VH FR4 (SEQ ID NOS: 1727-1728), VL FR1 (SEQ ID NOS: 1729-1750), VL FR2 (SEQ ID NOS: 1751-1777) and a VL FR3 (SEQ ID NOS: 1778-1792); a VH FR1 (SEQ ID NOS: 570-578), a VH FR2 (SEQ ID NOS: 579-602), a VH FR3 (SEQ ID NOS: 603-1726), a VH FR4 (SEQ ID NOS: 1727-1728), VL FR1 (SEQ ID NOS: 1729-1750), VL FR2 (SEQ ID NOS: 1751-1777) and a VL FR4 (SEQ ID NOS: 1793-1794); a VH FR1 (SEQ ID NOS: 570-578), a VH FR2 (SEQ ID NOS: 579-602), a VH FR3 (SEQ ID NOS: 603-1726), a VH FR4 (SEQ ID NOS: 1727-1728), VL FR2 (SEQ ID NOS: 1751-1777), VL FR3 (SEQ ID NOS: 1778-1792) and a VL FR4 (SEQ ID NOS: 1793-1794); a VH FR1 (SEQ ID NOS: 570-578), a VH FR2 (SEQ ID NOS: 579-602), a VH FR3 (SEQ ID NOS: 603-1726), a VL FR1 (SEQ ID NOS: 1729-1750), VL FR2 (SEQ ID NOS: 1751-1777), VL FR3 (SEQ ID NOS: 1778-1792) and a VL FR4 (SEQ ID NOS: 1793-1794); a VH FR1 (SEQ ID NOS: 570-578), a VH FR2 (SEQ ID NOS: 579-602), a VH FR4 (SEQ ID NOS: 1727-1728), a VL FR1 (SEQ ID NOS: 1729-1750), VL FR2 (SEQ ID NOS: 1751-1777), VL FR3 (SEQ ID NOS: 1778-1792) and a VL FR4 (SEQ ID NOS: 1793-1794); a VH FR1 (SEQ ID NOS: 570-578), a VH FR2 (SEQ ID NOS: 579-602), a VH FR3 (SEQ ID NOS: 603-1726), a VH FR4 (SEQ ID NOS: 1727-1728), a VL FR1 (SEQ ID NOS: 1729-1750), VL FR2 (SEQ ID NOS: 1751-1777), VL FR3 (SEQ ID NOS: 1778-1792) and a VL FR4 (SEQ ID NOS: 1793-1794); or any combination thereof of the VH FRs (SEQ ID NOS: 478-1636) and VL FRs (SEQ ID NOS: 1637-1702) listed in Tables 25.

[0289] In yet another aspect, antibodies are provided that compete with one of the exemplified antibodies or functional fragments for binding to GFRAL. Such antibodies may also bind to the same epitope as one of the herein exemplified antibodies, or an overlapping epitope. Antibodies and fragments that compete with or bind to the same epitope as the exemplified antibodies are expected to show similar functional properties. The exemplified antigen binding proteins and fragments include those with the VH and VL regions, and CDRs provided herein, including those in Tables 1-24. Thus, as a specific example, the antibodies that are provided include those that compete with an antibody comprising: (a) 1, 2, 3, 4, 5 or all 6 of the CDRs listed for an antibody listed in Tables 1-24; (b) a VH and a VL selected from the VH and a VL regions listed for an antibody listed in Tables 1-24; or (c) two light chains and two heavy chains comprising a VH and a VL as specified for an antibody listed in Tables 1-24.

[0290] In certain embodiments, antibodies of the compositions and methods of using the antibodies provided herein include those anti-GFRAL monoclonal antibodies described herein, e.g., in the Examples section. Any anti-GFRAL antibody can be used in any of the methods provided herein. In some embodiments of the various methods provided herein, the antibody comprises a VH region comprising the amino acid sequence of SEQ ID NO: 1, or a humanized variant thereof. In some embodiments of the various methods provided herein, the antibody comprises a VH region comprising the amino acid sequence of SEQ ID NO: 3, or a humanized variant thereof. In some embodiments of the various methods provided herein, the antibody comprises a VH region comprising the amino acid sequence of SEQ ID NO: 5, or a humanized variant thereof. In some embodiments of the various methods provided herein, the antibody comprises a VH region comprising the amino acid sequence of SEQ ID NO: 7, or a humanized variant thereof. In some embodiments of the various methods provided herein, the antibody comprises a VH region comprising the amino acid sequence of SEQ ID NO: 9, or a humanized variant thereof. In some embodiments of the various methods provided herein, the antibody comprises a VH region comprising the amino acid sequence of SEQ ID NO: 11, or a humanized variant thereof. In some embodiments of the various methods provided herein, the antibody comprises a VH region comprising the amino acid sequence of SEQ ID NO: 13, or a humanized variant thereof. In some embodiments of the various methods provided herein, the antibody comprises a VH region comprising the amino acid sequence of SEQ ID NO: 15, or a humanized variant thereof. In some embodiments of the various methods provided herein, the antibody comprises a VH region comprising the amino acid sequence of SEQ ID NO: 17, or a humanized variant thereof. In some embodiments of the various methods provided herein, the antibody comprises a VH region comprising the amino acid sequence of SEQ ID NO: 17, or a humanized variant thereof. In some embodiments of the various methods provided herein, the antibody comprises a VH region comprising the amino acid sequence of SEQ ID NO: 19, or a humanized variant thereof. In some embodiments of the various methods provided herein, the antibody comprises a VH region comprising the amino acid sequence of SEQ ID NO: 21, or a humanized variant thereof. In some embodiments of the various methods provided herein, the antibody comprises a VH region comprising the amino acid sequence of SEQ ID NO: 23, or a humanized variant thereof. In some embodiments of the various methods provided herein, the antibody comprises a VH region comprising the amino acid sequence of SEQ ID NO: 25, or a humanized variant thereof. In some embodiments of the various methods provided herein, the antibody comprises a VH region comprising the amino acid sequence of SEQ ID NO: 27, or a humanized variant thereof. In some embodiments of the various methods provided herein, the antibody comprises a VH region comprising the amino acid sequence of SEQ ID NO: 29, or a humanized variant thereof. In some embodiments of the various methods provided herein, the antibody comprises a VH region comprising the amino acid sequence of SEQ ID NO: 31, or a humanized variant thereof. In some embodiments of the various methods provided herein, the antibody comprises a VH region comprising the amino acid sequence of SEQ ID NO: 33, or a humanized variant thereof. In some embodiments of the various methods provided herein, the antibody comprises a VH region comprising the amino acid sequence of SEQ ID NO: 35, or a humanized variant thereof. In some embodiments of the various methods provided herein, the antibody comprises a VH region comprising the amino acid sequence of SEQ ID NO: 37, or a humanized variant thereof. In some embodiments of the various methods provided herein, the antibody comprises a VH region comprising the amino acid sequence of SEQ ID NO: 39, or a humanized variant thereof. In some embodiments of the various methods provided herein, the antibody comprises a VH region comprising the amino acid sequence of SEQ ID NO: 480, or a humanized variant thereof. In some embodiments of the various methods provided herein, the antibody comprises a VH region comprising the amino acid sequence of SEQ ID NO: 482, or a humanized variant thereof. In some embodiments of the various methods provided herein, the antibody comprises a VH region comprising the amino acid sequence of SEQ ID NO: 484, or a humanized variant thereof. In some embodiments of the various methods provided herein, the antibody comprises a VH region comprising the amino acid sequence of SEQ ID NO: 486, or a humanized variant thereof.

[0291] In some embodiments of the various methods provided herein, the antibody comprises a VL region comprising the amino acid sequence of SEQ ID NO: 2, or a humanized variant thereof. In some embodiments of the various methods provided herein, the antibody comprises a VL region comprising the amino acid sequence of SEQ ID NO: 4, or a humanized variant thereof. In some embodiments of the various methods provided herein, the antibody comprises a VL region comprising the amino acid sequence of SEQ ID NO: 6, or a humanized variant thereof. In some embodiments of the various methods provided herein, the antibody comprises a VL region comprising the amino acid sequence of SEQ ID NO: 8, or a humanized variant thereof. In some embodiments of the various methods provided herein, the antibody comprises a VL region comprising the amino acid sequence of SEQ ID NO: 10, or a humanized variant thereof. In some embodiments of the various methods provided herein, the antibody comprises a VL region comprising the amino acid sequence of SEQ ID NO: 12, or a humanized variant thereof. In some embodiments of the various methods provided herein, the antibody comprises a VL region comprising the amino acid sequence of SEQ ID NO: 14, or a humanized variant thereof. In some embodiments of the various methods provided herein, the antibody comprises a VL region comprising the amino acid sequence of SEQ ID NO: 16, or a humanized variant thereof. In some embodiments of the various methods provided herein, the antibody comprises a VL region comprising the amino acid sequence of SEQ ID NO: 18, or a humanized variant thereof. In some embodiments of the various methods provided herein, the antibody comprises a VL region comprising the amino acid sequence of SEQ ID NO: 20, or a humanized variant thereof. In some embodiments of the various methods provided herein, the antibody comprises a VL region comprising the amino acid sequence of SEQ ID NO: 22, or a humanized variant thereof. In some embodiments of the various methods provided herein, the antibody comprises a VL region comprising the amino acid sequence of SEQ ID NO: 24, or a humanized variant thereof. In some embodiments of the various methods provided herein, the antibody comprises a VL region comprising the amino acid sequence of SEQ ID NO: 26, or a humanized variant thereof. In some embodiments of the various methods provided herein, the antibody comprises a VL region comprising the amino acid sequence of SEQ ID NO: 28, or a humanized variant thereof. In some embodiments of the various methods provided herein, the antibody comprises a VL region comprising the amino acid sequence of SEQ ID NO: 30, or a humanized variant thereof. In some embodiments of the various methods provided herein, the antibody comprises a VL region comprising the amino acid sequence of SEQ ID NO: 32, or a humanized variant thereof. In some embodiments of the various methods provided herein, the antibody comprises a VL region comprising the amino acid sequence of SEQ ID NO: 34, or a humanized variant thereof. In some embodiments of the various methods provided herein, the antibody comprises a VL region comprising the amino acid sequence of SEQ ID NO: 36, or a humanized variant thereof. In some embodiments of the various methods provided herein, the antibody comprises a VL region comprising the amino acid sequence of SEQ ID NO: 38, or a humanized variant thereof. In some embodiments of the various methods provided herein, the antibody comprises a VL region comprising the amino acid sequence of SEQ ID NO: 40, or a humanized variant thereof. In some embodiments of the various methods provided herein, the antibody comprises a VL region comprising the amino acid sequence of SEQ ID NO: 481, or a humanized variant thereof. In some embodiments of the various methods provided herein, the antibody comprises a VL region comprising the amino acid sequence of SEQ ID NO: 483, or a humanized variant thereof. In some embodiments of the various methods provided herein, the antibody comprises a VL region comprising the amino acid sequence of SEQ ID NO: 485, or a humanized variant thereof. In some embodiments of the various methods provided herein, the antibody comprises a VL region comprising the amino acid sequence of SEQ ID NO: 487, or a humanized variant thereof.

[0292] In some embodiments of the various methods provided herein, the antibody comprises a VH region comprising the amino acid sequence of SEQ ID NO: 1, or a humanized variant thereof, and a VL region comprising the amino acid sequence of SEQ ID NO: 2, or a humanized variant thereof. In some embodiments of the various methods provided herein, the antibody comprises a VH region comprising the amino acid sequence of SEQ ID NO: 3, or a humanized variant thereof, and a VL region comprising the amino acid sequence of SEQ ID NO: 4, or a humanized variant thereof. In some embodiments of the various methods provided herein, the antibody comprises a VH region comprising the amino acid sequence of SEQ ID NO: 5, or a humanized variant thereof, and a VL region comprising the amino acid sequence of SEQ ID NO: 6, or a humanized variant thereof. In some embodiments of the various methods provided herein, the antibody comprises a VH region comprising the amino acid sequence of SEQ ID NO: 7, or a humanized variant thereof, and a VL region comprising the amino acid sequence of SEQ ID NO: 8, or a humanized variant thereof. In some embodiments of the various methods provided herein, the antibody comprises a VH region comprising the amino acid sequence of SEQ ID NO: 9, or a humanized variant thereof, and a VL region comprising the amino acid sequence of SEQ ID NO: 10, or a humanized variant thereof. In some embodiments of the various methods provided herein, the antibody comprises a VH region comprising the amino acid sequence of SEQ ID NO: 11, or a humanized variant thereof, and a VL region comprising the amino acid sequence of SEQ ID NO: 12, or a humanized variant thereof. In some embodiments of the various methods provided herein, the antibody comprises a VH region comprising the amino acid sequence of SEQ ID NO: 13, or a humanized variant thereof, and a VL region comprising the amino acid sequence of SEQ ID NO: 14, or a humanized variant thereof. In some embodiments of the various methods provided herein, the antibody comprises a VH region comprising the amino acid sequence of SEQ ID NO: 15, or a humanized variant thereof, and a VL region comprising the amino acid sequence of SEQ ID NO: 16, or a humanized variant thereof. In some embodiments of the various methods provided herein, the antibody comprises a VH region comprising the amino acid sequence of SEQ ID NO: 17, or a humanized variant thereof, and a VL region comprising the amino acid sequence of SEQ ID NO: 18, or a humanized variant thereof. In some embodiments of the various methods provided herein, the antibody comprises a VH region comprising the amino acid sequence of SEQ ID NO: 19, or a humanized variant thereof, and a VL region comprising the amino acid sequence of SEQ ID NO: 20, or a humanized variant thereof. In some embodiments of the various methods provided herein, the antibody comprises a VH region comprising the amino acid sequence of SEQ ID NO: 21, or a humanized variant thereof, and a VL region comprising the amino acid sequence of SEQ ID NO: 22, or a humanized variant thereof. In some embodiments of the various methods provided herein, the antibody comprises a VH region comprising the amino acid sequence of SEQ ID NO: 23, or a humanized variant thereof, and a VL region comprising the amino acid sequence of SEQ ID NO: 24, or a humanized variant thereof. In some embodiments of the various methods provided herein, the antibody comprises a VH region comprising the amino acid sequence of SEQ ID NO: 25, or a humanized variant thereof, and a VL region comprising the amino acid sequence of SEQ ID NO: 26, or a humanized variant thereof. In some embodiments of the various methods provided herein, the antibody comprises a VH region comprising the amino acid sequence of SEQ ID NO: 27, or a humanized variant thereof, and a VL region comprising the amino acid sequence of SEQ ID NO: 28, or a humanized variant thereof. In some embodiments of the various methods provided herein, the antibody comprises a VH region comprising the amino acid sequence of SEQ ID NO: 29, or a humanized variant thereof, and a VL region comprising the amino acid sequence of SEQ ID NO: 30, or a humanized variant thereof. In some embodiments of the various methods provided herein, the antibody comprises a VH region comprising the amino acid sequence of SEQ ID NO: 31, or a humanized variant thereof, and a VL region comprising the amino acid sequence of SEQ ID NO: 32, or a humanized variant thereof. In some embodiments of the various methods provided herein, the antibody comprises a VH region comprising the amino acid sequence of SEQ ID NO: 33, or a humanized variant thereof, and a VL region comprising the amino acid sequence of SEQ ID NO: 34, or a humanized variant thereof. In some embodiments of the various methods provided herein, the antibody comprises a VH region comprising the amino acid sequence of SEQ ID NO: 35, or a humanized variant thereof, and a VL region comprising the amino acid sequence of SEQ ID NO: 36, or a humanized variant thereof. In some embodiments of the various methods provided herein, the antibody comprises a VH region comprising the amino acid sequence of SEQ ID NO: 37, or a humanized variant thereof, and a VL region comprising the amino acid sequence of SEQ ID NO: 38, or a humanized variant thereof. In some embodiments of the various methods provided herein, the antibody comprises a VH region comprising the amino acid sequence of SEQ ID NO: 39, or a humanized variant thereof, and a VL region comprising the amino acid sequence of SEQ ID NO: 40, or a humanized variant thereof. In some embodiments of the various methods provided herein, the antibody comprises a VH region comprising the amino acid sequence of SEQ ID NO: 480, or a humanized variant thereof, and a VL region comprising the amino acid sequence of SEQ ID NO: 481, or a humanized variant thereof. In some embodiments of the various methods provided herein, the antibody comprises a VH region comprising the amino acid sequence of SEQ ID NO: 482, or a humanized variant thereof, and a VL region comprising the amino acid sequence of SEQ ID NO: 483, or a humanized variant thereof. In some embodiments of the various methods provided herein, the antibody comprises a VH region comprising the amino acid sequence of SEQ ID NO: 484, or a humanized variant thereof, and a VL region comprising the amino acid sequence of SEQ ID NO: 485, or a humanized variant thereof. In some embodiments of the various methods provided herein, the antibody comprises a VH region comprising the amino acid sequence of SEQ ID NO: 486, or a humanized variant thereof, and a VL region comprising the amino acid sequence of SEQ ID NO: 487, or a humanized variant thereof.

[0293] In some embodiments of the various methods provided herein, the antibody comprises a VH CDR1, VH CDR2, and VH CDR3 of a VH domain having the amino acid sequence of SEQ ID NO: 1 and a VL CDR1, VL CDR2, and VL CDR3 of a VL region comprising the amino acid sequence of SEQ ID NO: 2. In some embodiments of the various methods provided herein, the antibody comprises a VH CDR1, VH CDR2, and VH CDR3 of a VH domain having the amino acid sequence of SEQ ID NO: 3 and a VL CDR1, VL CDR2, and VL CDR3 of a VL region comprising the amino acid sequence of SEQ ID NO: 4. In some embodiments of the various methods provided herein, the antibody comprises a VH CDR1, VH CDR2, and VH CDR3 of a VH domain having the amino acid sequence of SEQ ID NO: 5 and a VL CDR1, VL CDR2, and VL CDR3 of a VL region comprising the amino acid sequence of SEQ ID NO: 6. In some embodiments of the various methods provided herein, the antibody comprises a VH CDR1, VH CDR2, and VH CDR3 of a VH domain having the amino acid sequence of SEQ ID NO: 7 and a VL CDR1, VL CDR2, and VL CDR3 of a VL region comprising the amino acid sequence of SEQ ID NO: 8. In some embodiments of the various methods provided herein, the antibody comprises a VH CDR1, VH CDR2, and VH CDR3 of a VH domain having the amino acid sequence of SEQ ID NO: 9 and a VL CDR1, VL CDR2, and VL CDR3 of a VL region comprising the amino acid sequence of SEQ ID NO: 10. In some embodiments of the various methods provided herein, the antibody comprises a VH CDR1, VH CDR2, and VH CDR3 of a VH domain having the amino acid sequence of SEQ ID NO: 11 and a VL CDR1, VL CDR2, and VL CDR3 of a VL region comprising the amino acid sequence of SEQ ID NO: 12. In some embodiments of the various methods provided herein, the antibody comprises a VH CDR1, VH CDR2, and VH CDR3 of a VH domain having the amino acid sequence of SEQ ID NO: 13 and a VL CDR1, VL CDR2, and VL CDR3 of a VL region comprising the amino acid sequence of SEQ ID NO: 14. In some embodiments of the various methods provided herein, the antibody comprises a VH CDR1, VH CDR2, and VH CDR3 of a VH domain having the amino acid sequence of SEQ ID NO: 15 and a VL CDR1, VL CDR2, and VL CDR3 of a VL region comprising the amino acid sequence of SEQ ID NO: 16. In some embodiments of the various methods provided herein, the antibody comprises a VH CDR1, VH CDR2, and VH CDR3 of a VH domain having the amino acid sequence of SEQ ID NO: 17 and a VL CDR1, VL CDR2, and VL CDR3 of a VL region comprising the amino acid sequence of SEQ ID NO: 18. In some embodiments of the various methods provided herein, the antibody comprises a VH CDR1, VH CDR2, and VH CDR3 of a VH domain having the amino acid sequence of SEQ ID NO: 19 and a VL CDR1, VL CDR2, and VL CDR3 of a VL region comprising the amino acid sequence of SEQ ID NO: 20. In some embodiments of the various methods provided herein, the antibody comprises a VH CDR1, VH CDR2, and VH CDR3 of a VH domain having the amino acid sequence of SEQ ID NO: 21 and a VL CDR1, VL CDR2, and VL CDR3 of a VL region comprising the amino acid sequence of SEQ ID NO: 22. In some embodiments of the various methods provided herein, the antibody comprises a VH CDR1, VH CDR2, and VH CDR3 of a VH domain having the amino acid sequence of SEQ ID NO: 23 and a VL CDR1, VL CDR2, and VL CDR3 of a VL region comprising the amino acid sequence of SEQ ID NO: 24. In some embodiments of the various methods provided herein, the antibody comprises a VH CDR1, VH CDR2, and VH CDR3 of a VH domain having the amino acid sequence of SEQ ID NO: 25 and a VL CDR1, VL CDR2, and VL CDR3 of a VL region comprising the amino acid sequence of SEQ ID NO: 26. In some embodiments of the various methods provided herein, the antibody comprises a VH CDR1, VH CDR2, and VH CDR3 of a VH domain having the amino acid sequence of SEQ ID NO: 27 and a VL CDR1, VL CDR2, and VL CDR3 of a VL region comprising the amino acid sequence of SEQ ID NO: 28. In some embodiments of the various methods provided herein, the antibody comprises a VH CDR1, VH CDR2, and VH CDR3 of a VH domain having the amino acid sequence of SEQ ID NO: 29 and a VL CDR1, VL CDR2, and VL CDR3 of a VL region comprising the amino acid sequence of SEQ ID NO: 30. In some embodiments of the various methods provided herein, the antibody comprises a VH CDR1, VH CDR2, and VH CDR3 of a VH domain having the amino acid sequence of SEQ ID NO: 31 and a VL CDR1, VL CDR2, and VL CDR3 of a VL region comprising the amino acid sequence of SEQ ID NO: 32. In some embodiments of the various methods provided herein, the antibody comprises a VH CDR1, VH CDR2, and VH CDR3 of a VH domain having the amino acid sequence of SEQ ID NO: 33 and a VL CDR1, VL CDR2, and VL CDR3 of a VL region comprising the amino acid sequence of SEQ ID NO: 34. In some embodiments of the various methods provided herein, the antibody comprises a VH CDR1, VH CDR2, and VH CDR3 of a VH domain having the amino acid sequence of SEQ ID NO: 35 and a VL CDR1, VL CDR2, and VL CDR3 of a VL region comprising the amino acid sequence of SEQ ID NO: 36. In some embodiments of the various methods provided herein, the antibody comprises a VH CDR1, VH CDR2, and VH CDR3 of a VH domain having the amino acid sequence of SEQ ID NO: 37 and a VL CDR1, VL CDR2, and VL CDR3 of a VL region comprising the amino acid sequence of SEQ ID NO: 38. In some embodiments of the various methods provided herein, the antibody comprises a VH CDR1, VH CDR2, and VH CDR3 of a VH domain having the amino acid sequence of SEQ ID NO: 39 and a VL CDR1, VL CDR2, and VL CDR3 of a VL region comprising the amino acid sequence of SEQ ID NO: 40. In some embodiments of the various methods provided herein, the antibody comprises a VH CDR1, VH CDR2, and VH CDR3 of a VH domain having the amino acid sequence of SEQ ID NO: 480 and a VL CDR1, VL CDR2, and VL CDR3 of a VL region comprising the amino acid sequence of SEQ ID NO: 481. In some embodiments of the various methods provided herein, the antibody comprises a VH CDR1, VH CDR2, and VH CDR3 of a VH domain having the amino acid sequence of SEQ ID NO: 482 and a VL CDR1, VL CDR2, and VL CDR3 of a VL region comprising the amino acid sequence of SEQ ID NO: 483. In some embodiments of the various methods provided herein, the antibody comprises a VH CDR1, VH CDR2, and VH CDR3 of a VH domain having the amino acid sequence of SEQ ID NO: 484 and a VL CDR1, VL CDR2, and VL CDR3 of a VL region comprising the amino acid sequence of SEQ ID NO: 485. In some embodiments of the various methods provided herein, the antibody comprises a VH CDR1, VH CDR2, and VH CDR3 of a VH domain having the amino acid sequence of SEQ ID NO: 486 and a VL CDR1, VL CDR2, and VL CDR3 of a VL region comprising the amino acid sequence of SEQ ID NO: 487. Other VH domain, VL domain, VH CDR1, VH CDR2, VH CDR3, VL CDR1, VL CDR2 and VL CDR3 sequences listed described herein are also contemplated for use in the various methods provided herein.

### 1. Polyclonal Antibodies

[0294] The antibodies of the present disclosure may comprise polyclonal antibodies. Methods of preparing polyclonal antibodies are known to the skilled artisan. Polyclonal antibodies can be raised in a mammal, for example, by one or more injections of an immunizing agent and, if desired, an adjuvant. Typically, the immunizing agent and/or adjuvant will be injected in the mammal by multiple subcutaneous or intraperitoneal injections. The immunizing agent may include a GFRAL polypeptide or a fusion protein thereof. It may be useful to conjugate the immunizing agent to a protein known to be immunogenic in the mammal being immunized or to immunize the mammal with the protein and one or more adjuvants. Examples of such immunogenic proteins include but are not limited to keyhole limpet hemocyanin, serum albumin, bovine thyroglobulin, and soybean trypsin inhibitor. Examples of adjuvants which may be employed include Ribi, CpG, Poly 1C, Freund's complete adjuvant and MPL-TDM adjuvant (monophosphoryl Lipid A, synthetic trehalose dicorynomycolate). The immunization protocol may be selected by one skilled in the art without undue experimentation. The mammal can then be bled, and the serum assayed for GFRAL antibody titer. If desired, the mammal can be boosted until the antibody titer increases or plateaus. Additionally or alternatively, lymphocytes may be obtained from the immunized animal for fusion and the preparation of monoclonal antibodies from hybridoma as described below.

### 2. Monoclonal Antibodies

[0295] The antibodies of the present disclosure may alternatively be monoclonal antibodies. Monoclonal antibodies may be made using the hybridoma method first described by Kohler et al., Nature, 256:495 (1975), or may be made by recombinant DNA methods (see, e.g., U.S. Pat. No. 4,816,567).

[0296] In the hybridoma method, a mouse or other appropriate host animal, such as a hamster, is immunized as described above to elicit lymphocytes that produce or are capable of producing antibodies that will specifically bind to the protein used for immunization. Alternatively, lymphocytes may be immunized in vitro. After immunization, lymphocytes are isolated and then fused with a myeloma cell line using a suitable fusing agent, such as polyethylene glycol, to form a hybridoma cell (Goding, Monoclonal Antibodies: Principles and Practice, pp. 59-103 (Academic Press, 1986)).

[0297] The hybridoma cells thus prepared are seeded and grown in a suitable culture medium which medium preferably contains one or more substances that inhibit the growth or survival of the unfused, parental myeloma cells (also referred to as fusion partner). For example, if the parental myeloma cells lack the enzyme hypoxanthine guanine phosphoribosyl transferase (HGPRT or HPRT), the selective culture medium for the hybridomas typically will include hypoxanthine, aminopterin, and thymidine (HAT medium), which substances prevent the growth of HGPRT-deficient cells.

[0298] Preferred fusion partner myeloma cells are those that fuse efficiently, support stable high-level production of antibody by the selected antibody-producing cells, and are sensitive to a selective medium that selects against the unfused parental cells. Preferred myeloma cell lines are murine myeloma lines, such as SP-2 and derivatives, for example, X63-Ag8-653 cells available from the American Type Culture Collection, Manassas, Virginia, USA and those derived from MOPC-21 and MPC-11 mouse tumors available from the Salk Institute Cell Distribution Center, San Diego, California USA. Human myeloma and mouse-human heteromyeloma cell lines also have been described for the production of human monoclonal antibodies (Kozbor, J., Immunol., 133:3001 (1984); and Brodeur et al., Monoclonal Antibody Production Techniques and Applications, pp. 51-63 (Marcel Dekker, Inc., New York, 1987)).

[0299] Culture medium in which hybridoma cells are growing is assayed for production of monoclonal antibodies directed against the antigen. The binding specificity of monoclonal antibodies produced by hybridoma cells is determined by immunoprecipitation or by an in vitro binding assay, such as radioimmunoassay (RIA) or enzyme-linked immunosorbent assay (ELISA). The binding affinity of the monoclonal antibody can, for example, be determined by the Scatchard analysis described in Munson et al., Anal. Biochem., 107:220 (1980).

[0300] Once hybridoma cells that produce antibodies of the desired specificity, affinity, and/or activity are identified, the clones may be subcloned by limiting dilution procedures and grown by standard methods (Goding, Monoclonal Antibodies: Principles and Practice, pp. 59-103 (Academic Press, 1986)). Suitable culture media for this purpose include, for example, D-MEM or RPMI-1640 medium. In addition, the hybridoma cells may be grown in vivo as ascites tumors in an animal, for example, by i.p. injection of the cells into mice.

[0301] The monoclonal antibodies secreted by the subclones are suitably separated from the culture medium, ascites fluid, or serum by conventional antibody purification procedures such as, for example, affinity chromatography (e.g., using protein A or protein G-Sepharose) or ion-exchange chromatography, hydroxylapatite chromatography, gel electrophoresis, dialysis, etc.

[0302] DNA encoding the monoclonal antibodies is readily isolated and sequenced using conventional procedures (e.g., by using oligonucleotide probes that are capable of binding specifically to genes encoding the heavy and light chains of murine antibodies). The hybridoma cells serve as a preferred source of such DNA. Once isolated, the DNA may be placed into expression vectors, which are then transfected into host cells such as E. coli cells, simian COS cells, Chinese Hamster Ovary (CHO) cells, or myeloma cells that do not otherwise produce antibody protein, to obtain the synthesis of monoclonal antibodies in the recombinant host cells. Review articles on recombinant expression in bacteria of DNA encoding the antibody include Skerra et al., Curr. Opinion in Immunol., 5:256-262 (1993) and Plückthun, Immunol. Revs. 130:151-188 (1992).

[0303] In some embodiments, an antibody that binds a GFRAL epitope comprises an amino acid sequence of a VH domain and/or an amino acid sequence of a VL domain encoded by a nucleotide sequence that hybridizes to (1) the complement of a nucleotide sequence encoding any one of the VH and/or VL domain described herein under stringent conditions (e.g., hybridization to filter-bound DNA in 6× sodium chloride/sodium citrate (SSC) at about 45° C. followed by one or more washes in 0.2×SSC/0.1% SDS at about 50-65° C.) under highly stringent conditions (e.g., hybridization to filter-bound nucleic acid in 6×SSC at about 45° C. followed by one or more washes in 0.1×SSC/0.2% SDS at about 68° C.), or under other stringent hybridization conditions which are known to those of skill in the art (see, for example, Ausubel, F. M. et al., eds., 1989, Current Protocols in Molecular Biology, Vol. I, Green Publishing Associates, Inc. and John Wiley & Sons, Inc., New York at pages 6.3.1-6.3.6 and 2.10.3).

[0304] In some embodiments, an antibody that binds a GFRAL epitope comprises an amino acid sequence of a VH CDR or an amino acid sequence of a VL CDR encoded by a nucleotide sequence that hybridizes to the complement of a nucleotide sequence encoding any one of the VH CDRs and/or VL CDRs depicted in Tables 1-24 under stringent conditions (e.g., hybridization to filter-bound DNA in 6×SSC at about 45° C. followed by one or more washes in 0.2×SSC/0.1% SDS at about 50-65° C.), under highly stringent conditions (e.g., hybridization to filter-bound nucleic acid in 6×SSC at about 45° C. followed by one or more washes in 0.1×SSC/0.2% SDS at about 68° C.), or under other stringent hybridization conditions which are known to those of skill in the art (see, for example, Ausubel, F. M. et al., eds., 1989, Current Protocols in Molecular Biology, Vol. I, Green Publishing Associates, Inc. and John Wiley & Sons, Inc., New York at pages 6.3.1-6.3.6 and 2.10.3).

[0305] In a further embodiment, monoclonal antibodies or antibody fragments can be isolated from antibody phage libraries generated using the techniques described in, for example, Antibody Phage Display: Methods and Protocols, P. M. O'Brien and R. Aitken, eds, Humana Press, Totawa N.J., 2002. In principle, synthetic antibody clones are selected by screening phage libraries containing phage that display various fragments of antibody variable region (Fv) fused to phage coat protein. Such phage libraries are screened for against the desired antigen. Clones expressing Fv fragments capable of binding to the desired antigen are adsorbed to the antigen and thus separated from the non-binding clones in the library. The binding clones are then eluted from the antigen, and can be further enriched by additional cycles of antigen adsorption/elution.

[0306] Variable domains can be displayed functionally on phage, either as single-chain Fv (scFv) fragments, in which VH and VL are covalently linked through a short, flexible peptide, or as Fab fragments, in which they are each fused to a constant domain and interact non-covalently, as described, for example, in Winter et al., Ann. Rev. Immunol., 12:433-455 (1994).

[0307] Repertoires of VH and VL genes can be separately cloned by polymerase chain reaction (PCR) and recombined randomly in phage libraries, which can then be searched for antigen-binding clones as described in Winter et al., supra. Libraries from immunized sources provide high-affinity antibodies to the immunogen without the requirement of constructing hybridomas. Alternatively, the naive repertoire can be cloned to provide a single source of human antibodies to a wide range of non-self and also self antigens without any immunization as described by Griffiths et al., EMBO J, 12:725-734 (1993). Finally, naive libraries can also be made synthetically by cloning the unrearranged V-gene segments from stem cells, and using PCR primers containing random sequence to encode the highly variable CDR3 regions and to accomplish rearrangement in vitro as described, for example, by Hoogenboom and Winter, J. Mol. Biol., 227:381-388 (1992).

[0308] Screening of the libraries can be accomplished by various techniques known in the art. For example, GFRAL, (e.g., a GFRAL polypeptide, fragment or epitope) can be used to coat the wells of adsorption plates, expressed on host cells affixed to adsorption plates or used in cell sorting, or conjugated to biotin for capture with streptavidin-coated beads, or used in any other method for panning display libraries. The selection of antibodies with slow dissociation kinetics (e.g., good binding affinities) can be promoted by use of long washes and monovalent phage display as described in Bass et al., Proteins, 8:309-314 (1990) and in WO 92/09690, and a low coating density of antigen as described in Marks et al., Biotechnol., 10:779-783 (1992).

[0309] Anti-GFRAL antibodies can be obtained by designing a suitable antigen screening procedure to select for the phage clone of interest followed by construction of a full length anti-GFRAL antibody clone using VH and/or VL sequences (e.g., the Fv sequences), or various CDR sequences from VH and VL sequences, from the phage clone of interest and suitable constant region (e.g., Fc) sequences described in Kabat et al., Sequences of Proteins of Immunological Interest, Fifth Edition, NIH Publication 91-3242, Bethesda MD (1991), vols. 1-3.

### 3. Antibody Fragments

[0310] The present disclosure provides antibodies and antibody fragments that bind to GFRAL. In certain circumstances there are advantages of using antibody fragments, rather than whole antibodies. The smaller size of the fragments allows for rapid clearance, and may lead to improved access to cells, tissues or organs. For a review of certain antibody fragments, see Hudson et al. (2003) Nat. Med. 9:129-134.

[0311] Various techniques have been developed for the production of antibody fragments. Traditionally, these fragments were derived via proteolytic digestion of intact antibodies (see, e.g., Morimoto et al., Journal of Biochemical and Biophysical Methods 24:107-117 (1992); and Brennan et al., Science, 229:81 (1985)). However, these fragments can now be produced directly by recombinant host cells. Fab, Fv and ScFv antibody fragments can all be expressed in and secreted from E. coli or yeast cells, thus allowing the facile production of large amounts of these fragments. Antibody fragments can be isolated from the antibody phage libraries discussed above. Alternatively, Fab′-SH fragments can be directly recovered from E. coli and chemically coupled to form F(ab′)₂ fragments (Carter et al., Bio/Technology 10:163-167 (1992)). According to another approach, F(ab′)₂ fragments can be isolated directly from recombinant host cell culture. Fab and F(ab′)₂ fragment with increased in vivo half-life comprising salvage receptor binding epitope residues are described, for example, U.S. Pat. No. 5,869,046. Other techniques for the production of antibody fragments will be apparent to the skilled practitioner. In certain embodiments, an antibody is a single chain Fv fragment (scFv) (see, e.g., WO 93/16185; U.S. Pat. Nos. 5,571,894; and 5,587,458). Fv and scFv have intact combining sites that are devoid of constant regions; thus, they may be suitable for reduced nonspecific binding during in vivo use. scFv fusion proteins may be constructed to yield fusion of an effector protein at either the amino or the carboxy terminus of an scFv. (See, e.g., Antibody Engineering, ed. Borrebaeck, supra). The antibody fragment may also be a “linear antibody”, for example, as described, for example, in the references cited above. Such linear antibodies may be monospecific or multi-specific, such as bispecific.

[0312] Smaller antibody-derived binding structures are the separate variable domains (V domains) also termed single variable domain antibodies (SdAbs). Certain types of organisms, the camelids and cartilaginous fish, possess high affinity single V-like domains mounted on an Fc equivalent domain structure as part of their immune system. (Woolven et al., Immunogenetics 50:98-101, 1999; Streltsov et al., Proc Natl Acad Sci USA. 101:12444-12449, 2004). The V-like domains (called VhH in camelids and V-NAR in sharks) typically display long surface loops, which allow penetration of cavities of target antigens. They also stabilize isolated VH domains by masking hydrophobic surface patches.

[0313] These VhH and V-NAR domains have been used to engineer sdAbs. Human V domain variants have been designed using selection from phage libraries and other approaches that have resulted in stable, high binding VL- and VH-derived domains.

[0314] Antibodies that bind to GFRAL as provided herein include, but are not limited to, synthetic antibodies, monoclonal antibodies, recombinantly produced antibodies, multispecific antibodies (including bi-specific antibodies), human antibodies, humanized antibodies, camelized antibodies, chimeric antibodies, intrabodies, anti-idiotypic (anti-Id) antibodies, and functional fragments, (e.g., GFRAL binding fragments) of any of the above. Non-limiting examples of functional fragments (e.g., fragments that bind to GFRAL) include single-chain Fvs (scFv) (e.g., including monospecific, bispecific, etc.), Fab fragments, F(ab′) fragments, F(ab)2 fragments, F(ab′)2 fragments, disulfide-linked Fvs (sdFv), Fd fragments, Fv fragments, diabody, triabody, tetrabody and minibody.

[0315] Antibodies provided herein include, but are not limited to, immunoglobulin molecules and immunologically active portions of immunoglobulin molecules, for example, molecules that contain an antigen binding site that bind to a GFRAL epitope. The immunoglobulin molecules provided herein can be of any type (e.g., IgG, IgE, IgM, IgD, IgA and IgY), class (e.g., IgG1, IgG2, IgG3, IgG4, IgA1 and IgA2) or subclass of immunoglobulin molecule.

[0316] Variants and derivatives of antibodies include antibody functional fragments that retain the ability to bind to a GFRAL epitope. Exemplary functional fragments include Fab fragments (e.g., an antibody fragment that contains the antigen-binding domain and comprises a light chain and part of a heavy chain bridged by a disulfide bond); Fab′ (e.g., an antibody fragment containing a single anti-binding domain comprising an Fab and an additional portion of the heavy chain through the hinge region); F(ab′)2 (e.g., two Fab′ molecules joined by interchain disulfide bonds in the hinge regions of the heavy chains; the Fab′ molecules may be directed toward the same or different epitopes); a bispecific Fab (e.g., a Fab molecule having two antigen binding domains, each of which may be directed to a different epitope); a single chain Fab chain comprising a variable region, also known as, a sFv (e.g., the variable, antigen-binding determinative region of a single light and heavy chain of an antibody linked together by a chain of 10-25 amino acids); a disulfide-linked Fv, or dsFv (e.g., the variable, antigen-binding determinative region of a single light and heavy chain of an antibody linked together by a disulfide bond); a camelized VH (e.g., the variable, antigen-binding determinative region of a single heavy chain of an antibody in which some amino acids at the VH interface are those found in the heavy chain of naturally occurring camel antibodies); a bispecific sFv (e.g., a sFv or a dsFv molecule having two antigen-binding domains, each of which may be directed to a different epitope); a diabody (e.g., a dimerized sFv formed when the VH domain of a first sFv assembles with the VL domain of a second sFv and the VL domain of the first sFv assembles with the VH domain of the second sFv; the two antigen-binding regions of the diabody may be directed towards the same or different epitopes); and a triabody (e.g., a trimerized sFv, formed in a manner similar to a diabody, but in which three antigen-binding domains are created in a single complex; the three antigen binding domains may be directed towards the same or different epitopes). Derivatives of antibodies also include one or more CDR sequences of an antibody combining site. The CDR sequences may be linked together on a scaffold when two or more CDR sequences are present. In certain embodiments, the antibody comprises a single-chain Fv (“scFv”). scFvs are antibody fragments comprising the VH and VL domains of an antibody, wherein these domains are present in a single polypeptide chain. The scFv polypeptide may further comprise a polypeptide linker between the VH and VL domains which enables the scFv to form the desired structure for antigen binding. For a review of scFvs see Pluckthun in The Pharmacology of Monoclonal Antibodies, vol. 113, Rosenburg and Moore eds. Springer-Verlag, New York, pp. 269-315 (1994).

### 4. Humanized Antibodies

[0317] The present disclosure provides humanized antibodies that bind GFRAL, including human GFRAL. Humanized antibodies of the present disclosure may comprise one or more CDRs as shown in Tables 1-24. Various methods for humanizing non-human antibodies are known in the art. For example, a humanized antibody can have one or more amino acid residues introduced into it from a source that is non-human. These non-human amino acid residues are often referred to as “import” residues, which are typically taken from an “import” variable domain. Humanization may be performed, for example, following the method of Winter and co-workers (Jones et al. (1986) Nature 321:522-525; Riechmann et al. (1988) Nature 332:323-327; Verhoeyen et al. (1988) Science 239:1534-1536), by substituting hypervariable region sequences for the corresponding sequences of a human antibody.

[0318] In some cases, the humanized antibodies are constructed by CDR grafting, in which the amino acid sequences of the six complementarity determining regions (CDRs) of the parent non-human antibody (e.g., rodent) are grafted onto a human antibody framework. For example, Padlan et al. (FASEB J. 9:133-139, 1995) determined that only about one third of the residues in the CDRs actually contact the antigen, and termed these the “specificity determining residues,” or SDRs. In the technique of SDR grafting, only the SDR residues are grafted onto the human antibody framework (see, e.g., Kashmiri et al., Methods 36:25-34, 2005).

[0319] The choice of human variable domains, both light and heavy, to be used in making the humanized antibodies can be important to reduce antigenicity. For example, according to the so-called “best-fit” method, the sequence of the variable domain of a non-human (e.g., rodent) antibody is screened against the entire library of known human variable-domain sequences. The human sequence which is closest to that of the rodent may be selected as the human framework for the humanized antibody (Sims et al. (1993) J. Immunol. 151:2296; Chothia et al. (1987) J. Mol. Biol. 196:901. Another method uses a particular framework derived from the consensus sequence of all human antibodies of a particular subgroup of light or heavy chains. The same framework may be used for several different humanized antibodies (Carter et al. (1992) Proc. Natl. Acad. Sci. USA, 89:4285; Presta et al. (1993) J. Immunol., 151:2623. In some cases, the framework is derived from the consensus sequences of the most abundant human subclasses, V_{L}6 subgroup I (V_{L}6I) and VH subgroup III (V_{H}III). In another method, human germline genes are used at the source of the framework regions.

[0320] In an alternative paradigm based on comparison of CDRs, called Superhumanization, FR homology is irrelevant. The method consists of comparison of the non-human sequence with the functional human germline gene repertoire. Those genes encoding the same or closely related canonical structures to the murine sequences are then selected. Next, within the genes sharing the canonical structures with the non-human antibody, those with highest homology within the CDRs are chosen as FR donors. Finally, the non-human CDRs are grafted onto these FRs (see, e.g., Tan et al., J. Immunol. 169:1119-1125, 2002).

[0321] It is further generally desirable that antibodies be humanized with retention of their affinity for the antigen and other favorable biological properties. To achieve this goal, according to one method, humanized antibodies are prepared by a process of analysis of the parental sequences and various conceptual humanized products using three-dimensional models of the parental and humanized sequences. Three-dimensional immunoglobulin models are commonly available and are familiar to those skilled in the art. Computer programs are available which illustrate and display probable three-dimensional conformational structures of selected candidate immunoglobulin sequences. These include, for example, WAM (Whitelegg and Rees, Protein Eng. 13:819-824, 2000), Modeller (Sali and Blundell, J. Mol. Biol. 234:779-815, 1993), and Swiss PDB Viewer (Guex and Peitsch, Electrophoresis 18:2714-2713, 1997). Inspection of these displays permits analysis of the likely role of the residues in the functioning of the candidate immunoglobulin sequence, e.g., the analysis of residues that influence the ability of the candidate immunoglobulin to bind its antigen. In this way, FR residues can be selected and combined from the recipient and import sequences so that the desired antibody characteristic, such as increased affinity for the target antigen(s), is achieved. In general, the hypervariable region residues are directly and most substantially involved in influencing antigen binding.

[0322] Another method for antibody humanization is based on a metric of antibody humanness termed Human String Content (HSC). This method compares the mouse sequence with the repertoire of human germline genes and the differences are scored as HSC. The target sequence is then humanized by maximizing its HSC rather than using a global identity measure to generate multiple diverse humanized variants. (Lazar et al., Mol. Immunol. 44:1986-1998, 2007).

[0323] In addition to the methods described above, empirical methods may be used to generate and select humanized antibodies. These methods include those that are based upon the generation of large libraries of humanized variants and selection of the best clones using enrichment technologies or high throughput screening techniques. Antibody variants may be isolated from phage, ribosome and yeast display libraries as well as by bacterial colony screening (see, e.g., Hoogenboom, Nat. Biotechnol. 23:1105-1116, 2005; Dufner et al., Trends Biotechnol. 24:523-529, 2006; Feldhaus et al., Nat. Biotechnol. 21:163-70, 2003; Schlapschy et al., Protein Eng. Des. Sel. 17:847-60, 2004).

[0324] In the FR library approach, a collection of residue variants are introduced at specific positions in the FR followed by selection of the library to select the FR that best supports the grafted CDR. The residues to be substituted may include some or all of the “Vernier” residues identified as potentially contributing to CDR structure (see, e.g., Foote and Winter, J. Mol. Biol. 224:487-499, 1992), or from the more limited set of target residues identified by Baca et al. (J. Biol. Chem. 272:10678-10684, 1997).

[0325] In FR shuffling, whole FRs are combined with the non-human CDRs instead of creating combinatorial libraries of selected residue variants (see, e.g., Dall'Acqua et al., Methods 36:43-60, 2005). The libraries may be screened for binding in a two-step selection process, first humanizing VL, followed by VH. Alternatively, a one-step FR shuffling process may be used. Such a process has been shown to be more efficient than the two-step screening, as the resulting antibodies exhibited improved biochemical and physico-chemical properties including enhanced expression, increased affinity and thermal stability (see, e.g., Damschroder et al., Mol. Immunol. 44:3049-60, 2007).

[0326] The “humaneering” method is based on experimental identification of essential minimum specificity determinants (MSDs) and is based on sequential replacement of non-human fragments into libraries of human FRs and assessment of binding. It begins with regions of the CDR3 of non-human VH and VL chains and progressively replaces other regions of the non-human antibody into the human FRs, including the CDR1 and CDR2 of both VH and VL. This methodology typically results in epitope retention and identification of antibodies from multiple sub-classes with distinct human V-segment CDRs. Humaneering allows for isolation of antibodies that are 91-96% homologous to human germline gene antibodies. (see, e.g., Alfenito, Cambridge Healthtech Institute's Third Annual PEGS, The Protein Engineering Summit, 2007).

[0327] The “human engineering” method involves altering an non-human antibody or antibody fragment, such as a mouse or chimeric antibody or antibody fragment, by making specific changes to the amino acid sequence of the antibody so as to produce a modified antibody with reduced immunogenicity in a human that nonetheless retains the desirable binding properties of the original non-human antibodies. Generally, the technique involves classifying amino acid residues of a non-human (e.g., mouse) antibody as “low risk”, “moderate risk”, or “high risk” residues. The classification is performed using a global risk/reward calculation that evaluates the predicted benefits of making particular substitution (e.g., for immunogenicity in humans) against the risk that the substitution will affect the resulting antibody's folding and/or are substituted with human residues. The particular human amino acid residue to be substituted at a given position (e.g., low or moderate risk) of a non-human (e.g., mouse) antibody sequence can be selected by aligning an amino acid sequence from the non-human antibody's variable regions with the corresponding region of a specific or consensus human antibody sequence. The amino acid residues at low or moderate risk positions in the non-human sequence can be substituted for the corresponding residues in the human antibody sequence according to the alignment. Techniques for making human engineered proteins are described in greater detail in Studnicka et al., Protein Engineering, 7:805-814 (1994), U.S. Pat. Nos. 5,766,886, 5,770,196, 5,821,123, and 5,869,619, and PCT Application Publication WO 93/11794.

### 5. Human Antibodies

[0328] Human anti-GFRAL antibodies can be constructed by combining Fv clone variable domain sequence(s) selected from human-derived phage display libraries with known human constant domain sequences(s). Alternatively, human monoclonal GFRAL antibodies of the present disclosure can be made by the hybridoma method. Human myeloma and mouse-human heteromyeloma cell lines for the production of human monoclonal antibodies have been described, for example, by Kozbor J. Immunol., 133:3001 (1984); Brodeur et al., Monoclonal Antibody Production Techniques and Applications, pp. 51-63 (Marcel Dekker, Inc., New York, 1987); and Boerner et al., J. Immunol., 147:86 (1991).

[0329] It is also possible to produce transgenic animals (e.g., mice) that are capable, upon immunization, of producing a full repertoire of human antibodies in the absence of endogenous immunoglobulin production. Transgenic mice that express human antibody repertoires have been used to generate high-affinity human sequence monoclonal antibodies against a wide variety of potential drug targets (see, e.g., Jakobovits, A., Curr. Opin. Biotechnol. 1995, 6 (5): 561-6; Brüggemann and Taussing, Curr. Opin. Biotechnol. 1997, 8 (4): 455-8; U.S. Pat. Nos. 6,075,181 and 6,150,584; and Lonberg et al., Nature Biotechnol. 23:1117-1125, 2005).

[0330] Alternatively, the human antibody may be prepared via immortalization of human B lymphocytes producing an antibody directed against a target antigen (e.g., such B lymphocytes may be recovered from an individual or may have been immunized in vitro) (see, e.g., Cole et al., Monoclonal Antibodies and Cancer Therapy, Alan R. Liss, p. 77 (1985); Boerner et al., J. Immunol., 147 (1): 86-95 (1991); and U.S. Pat. No. 5,750,373).

[0331] Gene shuffling can also be used to derive human antibodies from non-human, for example, rodent, antibodies, where the human antibody has similar affinities and specificities to the starting non-human antibody. According to this method, which is also called “epitope imprinting” or “guided selection”, either the heavy or light chain variable region of a non-human antibody fragment obtained by phage display techniques as described herein is replaced with a repertoire of human V domain genes, creating a population of non-human chain/human chain scFv or Fab chimeras. Selection with antigen results in isolation of a non-human chain/human chain chimeric scFv or Fab wherein the human chain restores the antigen binding site destroyed upon removal of the corresponding non-human chain in the primary phage display clone, (e.g., the epitope guides (imprints) the choice of the human chain partner). When the process is repeated in order to replace the remaining non-human chain, a human antibody is obtained (see, e.g., PCT WO 93/06213; and Osbourn et al., Methods., 36, 61-68, 2005). Unlike traditional humanization of non-human antibodies by CDR grafting, this technique provides completely human antibodies, which have no FR or CDR residues of non-human origin. Examples of guided selection to humanize mouse antibodies towards cell surface antigens include the folate-binding protein present on ovarian cancer cells (see, e.g., Figini et al., Cancer Res., 58, 991-996, 1998) and CD147, which is highly expressed on hepatocellular carcinoma (see, e.g., Bao et al., Cancer Biol. Ther., 4, 1374-1380, 2005).

[0332] A potential disadvantage of the guided selection approach is that shuffling of one antibody chain while keeping the other constant could result in epitope drift. In order to maintain the epitope recognized by the non-human antibody, CDR retention can be applied (see, e.g., Klimka et al., Br. J. Cancer., 83, 252-260, 2000; VH CDR2 Beiboer et al., J. Mol. Biol., 296, 833-49, 2000) In this method, the non-human VH CDR3 is commonly retained, as this CDR may be at the center of the antigen-binding site and may be to be the most important region of the antibody for antigen recognition. In some instances, however, VH CDR3 and VL CDR3, as well as VH CDR3, VL CDR3 and VL CFR1, of the non-human antibody may be retained.

### 6. Bispecific Antibodies

[0333] Bispecific antibodies are monoclonal antibodies that have binding specificities for at least two different antigens. In certain embodiments, bispecific antibodies are human or humanized antibodies. In certain embodiments, one of the binding specificities is for GFRAL and the other is for any other antigen. In some embodiments, bispecific antibodies can bind to two different epitopes of GFRAL. Bispecific antibodies can be prepared as full length antibodies or antibody fragments (e.g., F(ab′)₂ bispecific antibodies).

[0334] Methods for making bispecific antibodies are known in the art, such as, for example, by co-expression of two immunoglobulin heavy chain-light chain pairs, where the two heavy chains have different specificities (see, e.g., Milstein and Cuello, Nature, 305:537 (1983)). For further details of generating bispecific antibodies see, for example, Bispecific Antibodies, Kontermann, ed., Springer-Verlag, Hiedelberg (2011).

### 7. Multivalent Antibodies

[0335] A multivalent antibody may be internalized (and/or catabolized) faster than a bivalent antibody by a cell expressing an antigen to which the antibodies bind. The antibodies of the present disclosure can be multivalent antibodies (which are other than of the IgM class) with three or more antigen binding sites (e.g., tetravalent antibodies), which can be readily produced by recombinant expression of nucleic acid encoding the polypeptide chains of the antibody. The multivalent antibody can comprise a dimerization domain and three or more antigen binding sites. In certain embodiments, the dimerization domain comprises (or consists of) an Fc region or a hinge region. In this scenario, the antibody will comprise an Fc region and three or more antigen binding sites amino-terminal to the Fc region. In certain embodiments, a multivalent antibody comprises (or consists of) three to about eight antigen binding sites. In one such embodiment, a multivalent antibody comprises (or consists of) four antigen binding sites. The multivalent antibody comprises at least one polypeptide chain (for example, two polypeptide chains), wherein the polypeptide chain(s) comprise two or more variable domains. For instance, the polypeptide chain(s) may comprise VD1-(X1)n-VD2-(X2)n-Fc, wherein VD1 is a first variable domain, VD2 is a second variable domain, Fc is one polypeptide chain of an Fc region, X1 and X2 represent an amino acid or polypeptide, and n is 0 or 1. For instance, the polypeptide chain(s) may comprise: VH-CH1-flexible linker-VH-CH1-Fc region chain; or VH-CH1-VH-CH1-Fc region chain. The multivalent antibody herein may further comprise at least two (for example, four) light chain variable domain polypeptides. The multivalent antibody herein may, for instance, comprise from about two to about eight light chain variable domain polypeptides. The light chain variable domain polypeptides contemplated here comprise a light chain variable domain and, optionally, further comprise a CL domain.

### 8. Fc Engineering

[0336] It may be desirable to modify an antibody to GFRAL via Fc engineering, including, with respect to effector function, for example, so as to decrease or remove antigen-dependent cell-mediated cyotoxicity (ADCC) and/or complement dependent cytotoxicity (CDC) of the antibody. This may be achieved by introducing one or more amino acid substitutions in an Fc region of the antibody. For example, substitutions into human IgG1 using IgG2 residues as positions 233-236 and IgG4 residues at positions 327, 330 and 331 were shown to greatly reduce ADCC and CDC (see, e.g., Armour et al., Eur. J. Immunol. 29:(8): 2613-24 (1999); Shields et al., J. Biol. Chem. 276 (9): 6591-604 (2001).

[0337] To increase the serum half life of the antibody, one may incorporate a salvage receptor binding epitope into the antibody (especially an antibody fragment), for example, as described in U.S. Pat. No. 5,739,277. Term “salvage receptor binding epitope” refers to an epitope of the Fc region of an IgG molecule (e.g., IgG1, IgG2, IgG3, or IgG4) that is responsible for increasing the in vivo serum half-life of the lgG molecule.

### 9. Alternative Binding Agents

[0338] The present disclosure encompasses non-immunoglobulin binding agents that specifically bind to the same epitope as an anti-GFRAL antibody disclosed herein. In some embodiments, a non-immunoglobulin binding agent is identified an agent that displaces or is displaced by an anti-GFRAL antibody of the present disclosure in a competive binding assay. These alternative binding agents may include, for example, any of the engineered protein scaffolds known in the art. Such scaffolds may comprise one or more CDRs as shown in Tables 1-24. Such scaffolds include, for example, anticalins, which are based upon the lipocalin scaffold, a protein structure characterized by a rigid beta-barrel that supports four hypervariable loops which form the ligand binding site. Novel binding specificities may be engineered by targeted random mutagenesis in the loop regions, in combination with functional display and guided selection (see, e.g., Skerra (2008) FEBS J. 275:2677-2683). Other suitable scaffolds may include, for example, adnectins, or monobodies, based on the tenth extracellular domain of human fibronectin III (see, e.g., Koide and Koide (2007) Methods Mol. Biol. 352:95-109); affibodies, based on the Z domain of staphylococcal protein A (see, e.g., Nygren et al. (2008) FEBS J. 275:2668-2676)); DARPins, based on ankyrin repeat proteins (see, e.g., Stumpp et al. (2008) Drug. Discov. Today 13:695-701); fynomers, based on the SH3 domain of the human Fyn protein kinase Grabulovski et al. (2007) J. Biol. Chem. 282:3196-3204); affitins, based on Sac7d from Sulfolobus acidolarius (see, e.g., Krehenbrink et al. (2008) J. Mol. Biol. 383:1058-1068); affilins, based on human y-B-crystallin (see, e.g., Ebersbach et al. (2007) J. Mol. Biol. 372:172-185); avimers, based on the A domains of membrane receptor proteins (see, e.g., Silverman et al. (2005) Biotechnol. 23:1556-1561); cysteine-rich knottin peptides (see, e.g., Kolmar (2008) FEBS J. 275:2684-2690); and engineered Kunitz-type inhibitors (see, e.g., Nixon and Wood (2006) Curr. Opin. Drug. Discov. Dev. 9:261-268) For a review, see, for example, Gebauer and Skerra (2009) Curr. Opin. Chem. Biol. 13:245-255.

### Antibody Variants

[0339] In some embodiments, amino acid sequence modification(s) of the antibodies that bind to GFRAL described herein are contemplated. For example, it may be desirable to improve the binding affinity and/or other biological properties of the antibody, including but not limited to specificity, thermostability, expression level, effector functions, glycosylation, reduced immunogenicity or solubility. This, in addition to the anti-GFRAL antibodies described herein, it is contemplated that anti-GFRAL antibody variants can be prepared. For example, anti-GFRAL antibody variants can be prepared by introducing appropriate nucleotide changes into the encoding DNA, and/or by synthesis of the desired antibody or polypeptide. Those skilled in the art will appreciate that amino acid changes may alter post-translational processes of the anti-GFRAL antibody, such as changing the number or position of glycosylation sites or altering the membrane anchoring characteristics.

[0340] In some embodiments, antibodies provided herein are chemically modified, for example, by the association with, including covalent attachment of, any type of molecule with the antibody. The antibody derivatives may include antibodies that have been chemically modified, for example, by glycosylation, acetylation, pegylation, phosphorylation, amidation, derivatization by known protecting/blocking groups, proteolytic cleavage, linkage to a cellular ligand or other protein, etc. Any of numerous chemical modifications may be carried out by known techniques, including, but not limited, to specific chemical cleavage, acetylation, formulation, metabolic synthesis of tunicamycin, etc. Additionally, the antibody may contain one or more non-classical amino acids.

[0341] Variations may be a substitution, deletion or insertion of one or more codons encoding the antibody or polypeptide that results in a change in the amino acid sequence as compared with the native sequence antibody or polypeptide. Amino acid substitutions can be the result of replacing one amino acid with another amino acid having similar structural and/or chemical properties, such as the replacement of a leucine with a serine, e.g., conservative amino acid replacements. Insertions or deletions may optionally be in the range of about 1 to 5 amino acids. In certain embodiments, the substitution, deletion or insertion includes less than 25 amino acid substitutions, less than 20 amino acid substitutions, less than 15 amino acid substitutions, less than 10 amino acid substitutions, less than 5 amino acid substitutions, less than 4 amino acid substitutions, less than 3 amino acid substitutions, or less than 2 amino acid substitutions relative to the original molecule. In a specific embodiment, the substitution is a conservative amino acid substitution made at one or more predicted non-essential amino acid residues. The variation allowed may be determined by systematically making insertions, deletions or substitutions of amino acids in the sequence and testing the resulting variants for activity exhibited by the full-length or mature native sequence.

[0342] Amino acid sequence insertions include amino- and/or carboxyl-terminal fusions ranging in length from one residue to polypeptides containing a hundred or more residues, as well as intrasequence insertions of single or multiple amino acid residues. Examples of terminal insertions include an antibody with an N-terminal methionyl residue. Other insertional variants of the antibody molecule include the fusion to the N- or C-terminus of the antibody to an enzyme (e.g., for antibody-directed enzyme prodrug therapy) or a polypeptide which increases the serum half-life of the antibody.

[0343] Substantial modifications in the biological properties of the antibody are accomplished by selecting substitutions that differ significantly in their effect on maintaining (a) the structure of the polypeptide backbone in the area of the substitution, for example, as a sheet or helical conformation, (b) the charge or hydrophobicity of the molecule at the target site, or (c) the bulk of the side chain. Alternatively, conservative (e.g., within an amino acid group with similar properties and/or sidechains) substitutions may be made, so as to maintain or not significantly change the properties. Amino acids may be grouped according to similarities in the properties of their side chains (see, e.g., A. L. Lehninger, in Biochemistry, 2nd Ed., pp. 73-75, Worth Publishers, New York (1975)): (1) non-polar: Ala (A), Val (V), Leu (L), Ile (I), Pro (P), Phe (F), Trp (W), Met (M); (2) uncharged polar: Gly (G), Ser(S), Thr (T), Cys (C), Tyr (Y), Asn (N), Gln (Q); (3) acidic: Asp (D), Glu (E); and (4) basic: Lys (K), Arg (R), His (H).

[0344] Alternatively, naturally occurring residues may be divided into groups based on common side-chain properties: (1) hydrophobic: Norleucine, Met, Ala, Val, Leu, Ile; (2) neutral hydrophilic: Cys, Ser, Thr, Asn, Gln; (3) acidic: Asp, Glu; (4) basic: His, Lys, Arg; (5) residues that influence chain orientation: Gly, Pro; and (6) aromatic: Trp, Tyr, Phe.

[0345] Non-conservative substitutions entail exchanging a member of one of these classes for another class. Such substituted residues also may be introduced into the conservative substitution sites or, into the remaining (non-conserved) sites. Accordingly, in one embodiment, an antibody or fragment thereof that binds to a GFRAL epitope comprises an amino acid sequence that is at least 35%, at least 40%, at least 45%, at least 50%, at least 55%, at least 60%, at least 65%, at least 70%, at least 75%, at least 80%, at least 85%, at least 90%, at least 95%, or at least 99% identical to the amino acid sequence of a murine monoclonal antibody described herein. In one embodiment, an antibody or fragment thereof that binds to a GFRAL epitope comprises an amino acid sequence that is at least 35%, at least 40%, at least 45%, at least 50%, at least 55%, at least 60%, at least 65%, at least 70%, at least 75%, at least 80%, at least 85%, at least 90%, at least 95%, or at least 99% identical to an amino acid sequence depicted in Tables 1-24. In yet another embodiment, an antibody or fragment thereof that binds to a GFRAL epitope comprises a VH CDR and/or a VL CDR amino acid sequence that is at least 35%, at least 40%, at least 45%, at least 50%, at least 55%, at least 60%, at least 65%, at least 70%, at least 75%, at least 80%, at least 85%, at least 90%, at least 95%, or at least 99% identical to a VH CDR amino acid sequence depicted in Tables 1-24 and/or a VL CDR amino acid sequence depicted in Tables 1-24. The variations can be made using methods known in the art such as oligonucleotide-mediated (site-directed) mutagenesis, alanine scanning, and PCR mutagenesis. Site-directed mutagenesis (see, e.g., Carter et al., Nucl. Acids Res., 13:4331 (1986); Zoller et al., Nucl. Acids Res., 10:6487 (1987)), cassette mutagenesis (see, e.g., Wells et al., Gene, 34:315 (1985)), restriction selection mutagenesis (see, e.g., Wells et al., Philos. Trans. R. Soc. London SerA, 317:415 (1986)) or other known techniques can be performed on the cloned DNA to produce the anti-GFRAL antibody variant DNA.

[0346] Any cysteine residue not involved in maintaining the proper conformation of the anti-GFRAL antibody also may be substituted, for example, with with another amino acid such as alanine or serine, to improve the oxidative stability of the molecule and prevent aberrant crosslinking. Conversely, cysteine bond(s) may be added to the anti-GFRAL antibody to improve its stability (e.g., where the antibody is an antibody fragment such as an Fv fragment).

[0347] In some embodiments, an anti-GFRAL antibody molecule of the present disclosure is a “de-immunized” antibody. A “de-immunized” anti-GFRAL antibody is an antibody derived from a humanized or chimeric anti-GFRAL antibody, that has one or more alterations in its amino acid sequence resulting in a reduction of immunogenicity of the antibody, compared to the respective original non-de-immunized antibody. One of the procedures for generating such antibody mutants involves the identification and removal of T-cell epitopes of the antibody molecule. In a first step, the immunogenicity of the antibody molecule can be determined by several methods, for example, by in vitro determination of T-cell epitopes or in silico prediction of such epitopes, as known in the art. Once the critical residues for T-cell epitope function have been identified, mutations can be made to remove immunogenicity and retain antibody activity. For review, see, for example, Jones et al., Methods in Molecular Biology 525:405-423, 2009.

1. In vitro Affinity Maturation

[0348] In some embodiments, antibody variants having an improved property such as affinity, stability, or expression level as compared to a parent antibody may be prepared by in vitro affinity maturation. Like the natural prototype, in vitro affinity maturation is based on the principles of mutation and selection. Libraries of antibodies are displayed as Fab, scFv or V domain fragments either on the surface of an organism (e.g., phage, bacteria, yeast or mammalian cell) or in association (e.g., covalently or non-covalently) with their encoding mRNA or DNA. Affinity selection of the displayed antibodies allows isolation of organisms or complexes carrying the genetic information encoding the antibodies. Two or three rounds of mutation and selection using display methods such as phage display usually results in antibody fragments with affinities in the low nanomolar range. Preferred affinity matured antibodies will have nanomolar or even picomolar affinities for the target antigen.

[0349] Phage display is a widepread method for display and selection of antibodies. The antibodies are displayed on the surface of Fd or M13 bacteriophages as fusions to the bacteriophage coat protein. Selection involves exposure to antigen to allow phage-displayed antibodies to bind their targets, a process referred to as “panning.” Phage bound to antigen are recovered and infected in bacteria to produce phage for further rounds of selection. For review, see, for example, Hoogenboom, Methods. Mol. Biol. 178:1-37, 2002; Bradbury and Marks, J. Immuno. Methods 290:29-49, 2004).

[0350] In a yeast display system (see, e.g., Boder et al., Nat. Biotech. 15:553-57, 1997; Chao et al., Nat. Protocols 1:755-768, 2006), the antibody may be displayed as single-chain variable fusions (scFv) in which the heavy and light chains are connected by a flexible linker. The scFv is fused to the adhesion subunit of the yeast agglutinin protein Aga2p, which attaches to the yeast cell wall through disulfide bonds to Aga1p. Display of a protein via Aga2p projects the protein away from the cell surface, minimizing potential interactions with other molecules on the yeast cell wall. Magnetic separation and flow cytometry are used to screen the library to select for antibodies with improved affinity or stability. Binding to a soluble antigen of interest is determined by labeling of yeast with biotinylated antigen and a secondary reagent such as streptavidin conjugated to a fluorophore. Variations in surface expression of the antibody can be measured through immunofluorescence labeling of either the hemagglutinin or c-Myc epitope tag flanking the scFv. Expression has been shown to correlate with the stability of the displayed protein, and thus antibodies can be selected for improved stability as well as affinity (see, e.g., Shusta et al., J. Mol. Biol. 292:949-956, 1999). An additional advantage of yeast display is that displayed proteins are folded in the endoplasmic reticulum of the eukaryotic yeast cells, taking advantage of endoplasmic reticulum chaperones and quality-control machinery. Once maturation is complete, antibody affinity can be conveniently ‘titrated’ while displayed on the surface of the yeast, eliminating the need for expression and purification of each clone. A theoretical limitation of yeast surface display is the potentially smaller functional library size than that of other display methods; however, a recent approach uses the yeast cells' mating system to create combinatorial diversity estimated to be 10¹⁴ in size (see, e.g., US Patent Publication 2003/0186,374; Blaise et al., Gene 342:211-218, 2004).

[0351] In ribosome display, antibody-ribosome-mRNA (ARM) complexes are generated for selection in a cell-free system. The DNA library coding for a particular library of antibodies is genetically fused to a spacer sequence lacking a stop codon. This spacer sequence, when translated, is still attached to the peptidyl tRNA and occupies the ribosomal tunnel, and thus allows the protein of interest to protrude out of the ribosome and fold. The resulting complex of mRNA, ribosome, and protein can bind to surface-bound ligand, allowing simultaneous isolation of the antibody and its encoding mRNA through affinity capture with the ligand. The ribosome-bound mRNA is then reversed transcribed back into cDNA, which can then undergo mutagenesis and be used in the next round of selection (see, e.g., Fukuda et al., Nucleic Acids Res. 34, e127, 2006). In mRNA display, a covalent bond between antibody and mRNA is established using puromycin as an adaptor molecule (Wilson et al., Proc. Natl. Acad. Sci. USA 98, 3750-3755, 2001).

[0352] As these methods are performed entirely in vitro, they provide two main advantages over other selection technologies. First, the diversity of the library is not limited by the transformation efficiency of bacterial cells, but only by the number of ribosomes and different mRNA molecules present in the test tube. Second, random mutations can be introduced easily after each selection round, for example, by non-proofreading polymerases, as no library must be transformed after any diversification step.

[0353] Diversity may be introduced into the CDRs or the whole V genes of the antibody libraries in a targeted manner or via random introduction. The former approach includes sequentially targeting all the CDRs of an antibody via a high or low level of mutagenesis or targeting isolated hot spots of somatic hypermutations (see, e.g., Ho, et al., J. Biol. Chem. 280:607-617, 2005) or residues suspected of affecting affinity on experimental basis or structural reasons. Random mutations can be introduced throughout the whole V gene using E. coli mutator strains, error-prone replication with DNA polymerases (see, e.g., Hawkins et al., J. Mol. Biol. 226:889-896, 1992) or RNA replicases. Diversity may also be introduced by replacement of regions that are naturally diverse via DNA shuffling or similar techniques (see, e.g., Lu et al., J. Biol. Chem. 278:43496-43507, 2003; U.S. Pat. Nos. 5,565,332; 6,989,250). Alternative techniques target hypervariable loops extending into framework-region residues (see, e.g., Bond et al., J. Mol. Biol. 348:699-709, 2005) employ loop deletions and insertions in CDRs or use hybridization-based diversification (see, e.g., US Patent Publication No. 2004/0005709). Additional methods of generating diversity in CDRs are disclosed, for example, in U.S. Pat. No. 7,985,840.

[0354] Screening of the libraries can be accomplished by various techniques known in the art. For example, GFRAL can be immobilized onto solid supports, columns, pins or cellulose/poly(vinylidene fluoride) membranes/other filters, expressed on host cells affixed to adsorption plates or used in cell sorting, or conjugated to biotin for capture with streptavidin-coated beads, or used in any other method for panning display libraries.

[0355] For review of in vitro affinity maturation methods, see, e.g., Hoogenboom, Nature Biotechnology 23:1105-1116, 2005 and Quiroz and Sinclair, Revista Ingeneria Biomedia 4:39-51, 2010 and references therein.

### 2. Modifications of Anti-GFRAL Antibodies

[0356] Covalent modifications of anti-GFRAL antibodies are included within the scope of the present disclosure. Covalent modifications include reacting targeted amino acid residues of an anti-GFRAL antibody with an organic derivatizing agent that is capable of reacting with selected side chains or the N- or C-terminal residues of the anti-GFRAL antibody. Other modifications include deamidation of glutaminyl and asparaginyl residues to the corresponding glutamyl and aspartyl residues, respectively, hydroxylation of proline and lysine, phosphorylation of hydroxyl groups of seryl or threonyl residues, methylation of the α-amino groups of lysine, arginine, and histidine side chains (see, e.g., T. E. Creighton, Proteins: Structure and Molecular Properties, W.H. Freeman & Co., San Francisco, pp. 79-86 (1983)), acetylation of the N-terminal amine, and amidation of any C-terminal carboxyl group.

[0357] Other types of covalent modification of the anti-GFRAL antibody included within the scope of this present disclosure include altering the native glycosylation pattern of the antibody or polypeptide (see, e.g., Beck et al., Curr. Pharm. Biotechnol. 9:482-501, 2008; Walsh, Drug Discov. Today 15:773-780, 2010), and linking the antibody to one of a variety of nonproteinaceous polymers, e.g., polyethylene glycol (PEG), polypropylene glycol, or polyoxyalkylenes, in the manner set forth, for example, in U.S. Pat. Nos. 4,640,835; 4,496,689; 4,301,144; 4,670,417; 4,791,192 or 4,179,337.

[0358] An anti-GFRAL antibody of the present disclosure may also be modified to form chimeric molecules comprising an anti-GFRAL antibody fused to another, heterologous polypeptide or amino acid sequence, for example, an epitope tag (see, e.g., Terpe, Appl. Microbiol. Biotechnol. 60:523-533, 2003) or the Fc region of an IgG molecule (see, e.g., Aruffo, “Immunoglobulin fusion proteins” in Antibody Fusion Proteins, S. M. Chamow and A. Ashkenazi, eds., Wiley-Liss, New York, 1999, pp. 221-242).

[0359] Also provided herein are fusion proteins comprising an antibody provided herein that binds to a GFRAL antigen and a heterologous polypeptide. In some embodiments, the heterologous polypeptide to which the antibody is fused is useful for targeting the antibody to cells having cell surface-expressed GFRAL.

[0360] Also provided herein are panels of antibodies that bind to a GFRAL antigen. In specific embodiments, panels of antibodies have different association rate constants different dissociation rate constants, different affinities for GFRAL antigen, and/or different specificities for a GFRAL antigen. In some embodiments, the panels comprise or consist of about 10, about 25, about 50, about 75, about 100, about 125, about 150, about 175, about 200, about 250, about 300, about 350, about 400, about 450, about 500, about 550, about 600, about 650, about 700, about 750, about 800, about 850, about 900, about 950, or about 1000 antibodies or more. Panels of antibodies can be used, for example, in 96 well or 384 well plates, such as for assays such as ELISAs.

### Preparation of Anti-GFRAL Antibodies

[0361] Anti-GFRAL antibodies may be produced by culturing cells transformed or transfected with a vector containing anti-GFRAL antibody-encoding nucleic acids. Polynucleotide sequences encoding polypeptide components of the antibody of the present disclosure can be obtained using standard recombinant techniques. Desired polynucleotide sequences may be isolated and sequenced from antibody producing cells such as hybridomas cells. Alternatively, polynucleotides can be synthesized using nucleotide synthesizer or PCR techniques. Once obtained, sequences encoding the polypeptides are inserted into a recombinant vector capable of replicating and expressing heterologous polynucleotides in host cells. Many vectors that are available and known in the art can be used for the purpose of the present disclosure. Selection of an appropriate vector will depend mainly on the size of the nucleic acids to be inserted into the vector and the particular host cell to be transformed with the vector. Host cells suitable for expressing antibodies of the present disclosure include prokaryotes such as Archaebacteria and Eubacteria, including Gram-negative or Gram-positive organisms, eukaryotic microbes such as filamentous fungi or yeast, invertebrate cells such as insect or plant cells, and vertebrate cells such as mammalian host cell lines. Host cells are transformed with the above-described expression vectors and cultured in conventional nutrient media modified as appropriate for inducing promoters, selecting transformants, or amplifying the genes encoding the desired sequences. Antibodies produced by the host cells are purified using standard protein purification methods as known in the art.

[0362] Methods for antibody production including vector construction, expression and purification are further described, in Pluckthun et al., (1996) in Antibody Engineering: Producing antibodies in Escherichia coli: From PCR to fermentation (McCafferty, J., Hoogenboom, H. R., and Chiswell, D. J., eds), 1 Ed., pp. 203-252, IRL Press, Oxford; Kwong, K. & Rader, C., E. coli expression and purification of Fab antibody fragments, Current protocols in protein science editorial board John E Coligan et al., Chapter 6, Unit 6.10 (2009); Tachibana and Takekoshi, “Production of Antibody Fab Fragments in Escherischia coli,” in Antibody Expression and Production, M. Al-Rubeai, Ed., Springer, New York, 2011; Therapeutic Monoclonal Antibodies: From Bench to Clinic (ed Z. An), John Wiley & Sons, Inc., Hoboken, NJ, USA.

[0363] It is, of course, contemplated that alternative methods, which are well known in the art, may be employed to prepare anti-GFRAL antibodies. For instance, the appropriate amino acid sequence, or portions thereof, may be produced by direct peptide synthesis using solid-phase techniques (see, e.g., Stewart et al., Solid-Phase Peptide Synthesis, W.H. Freeman Co., San Francisco, CA (1969); Merrifield, J. Am. Chem. Soc., 85:2149-2154 (1963)). In vitro protein synthesis may be performed using manual techniques or by automation. Various portions of the anti-GFRAL antibody may be chemically synthesized separately and combined using chemical or enzymatic methods to produce the desired anti-GFRAL antibody. Alternatively, antibodies may be purified from cells or bodily fluids, such as milk, of a transgenic animal engineered to express the antibody, as disclosed, for example, in U.S. Pat. Nos. 5,545,807 and 5,827,690.

### Immunoconjugates

[0364] The present disclosure also provides conjugates comprising any one of the anti-GFRAL antibodies of the present disclosure covalently bound, including by a synthetic linker, to one or more non-antibody agents.

[0365] A variety of radioactive isotopes are available for the production of radioconjugated antibodies. Examples include At²¹¹, I4, I4, Y4, Re4, Re4, Sm4, Bi4, P4, Pb4 and radioactive isotopes of Lu. When the conjugate is used for detection, it may comprise a radioactive atom for scintigraphic studies, for example tc4 or I4, or a spin label for nuclear magnetic resonance (NMR) imaging (also known as magnetic resonance imaging, MRI), such as iodine-123 again, iodine-131, indium-111, fluorine-19, carbon-13, nitrogen-15, oxygen-17, gadolinium, manganese or iron. The radioisotopes may be incorporated in the conjugate in known ways as described, e.g., in Reilly, “The radiochemistry of monoclonal antibodies and peptides,” in Monoclonal Antibody and Peptide-Targeted Radiotherapy of Cancer, R. M. Reilly, ed., Wiley, Hoboken N.J., 2010.

[0366] In some embodiments, antibodies provided herein are conjugated or recombinantly fused to a diagnostic, detectable or therapeutic agent or any other molecule. The conjugated or recombinantly fused antibodies can be useful, for example, for monitoring or prognosing the onset, development, progression and/or severity of a β-cell defective disease, disorder or condition as part of a clinical testing procedure, such as determining the efficacy of a particular therapy.

[0367] Such diagnosis and detection can accomplished, for example, by coupling the antibody to detectable substances including, but not limited to, various enzymes, such as, but not limited to, horseradish peroxidase, alkaline phosphatase, beta-galactosidase, or acetylcholinesterase; prosthetic groups, such as, but not limited to, streptavidin/biotin and avidin/biotin; fluorescent materials, such as, but not limited to, umbelliferone, fluorescein, fluorescein isothiocynate, rhodamine, dichlorotriazinylamine fluorescein, dansyl chloride or phycoerythrin; luminescent materials, such as, but not limited to, luminol; bioluminescent materials, such as but not limited to, luciferase, luciferin, and aequorin; chemiluminescent material, such as but not limited to, an acridinium based compound or a HALOTAG; radioactive materials, such as, but not limited to, iodine (¹³¹I, ¹²⁵I, ¹²³I, and ¹²¹I), carbon (¹⁴C), sulfur (³⁵S), tritium (³H), indium (¹¹⁵In, ¹¹³In, ¹¹²In, and ¹¹¹In,), technetium (⁹⁹Tc), thallium (²⁰¹Ti), gallium (⁶⁸Ga, ⁶⁷Ga), palladium (¹⁰³Pd), molybdenum (⁹⁹Mo), xenon (¹³³Xe), fluorine (¹⁸F), ¹⁵³Sm, ¹⁷⁷Lu, ¹⁵⁹Gd, ¹⁴⁹Pm, ¹⁴⁰La, ¹⁷⁵Yb, ¹⁶⁶Ho, ⁹⁰Y, ⁴⁷Sc, ¹⁸⁶Re, ¹⁸⁸Re, ¹⁴²Pr, ¹⁰⁵Rh, ⁹⁷Ru, ⁶⁸Ge, ⁵⁷Co, ⁶⁵Zn, ⁸⁵Sr, ³²P, ¹⁵³Gd, ¹⁶⁹Yb, ⁵¹Cr, ⁵⁴Mn, ⁷⁵Se, ¹¹³Sn, and ¹¹⁷Sn; and positron emitting metals using various positron emission tomographies, and non-radioactive paramagnetic metal ions.

[0368] Also provided herein are antibodies that are conjugated or recombinantly fused to a therapeutic moiety (or one or more therapeutic moieties), as well as uses thereof. The antibody may be conjugated or recombinantly fused to a therapeutic moiety, including a cytotoxin such as a cytostatic or cytocidal agent, a therapeutic agent or a radioactive metal ion such as alpha-emitters. A cytotoxin or cytotoxic agent includes any agent that is detrimental to cells.

[0369] Further, an antibody provided herein may be conjugated or recombinantly fused to a therapeutic moiety or drug moiety that modifies a given biological response. Therapeutic moieties or drug moieties are not to be construed as limited to classical chemical therapeutic agents. For example, the drug moiety may be a protein, peptide, or polypeptide possessing a desired biological activity. Such proteins may include, for example, a toxin such as abrin, ricin A, pseudomonas exotoxin, cholera toxin, or diphtheria toxin; a protein such as tumor necrosis factor, γ-interferon, α-interferon, nerve growth factor, platelet derived growth factor, tissue plasminogen activator, an apoptotic agent, e.g., TNF-γ, TNF-γ, AIM I (see, e.g., International Publication No. WO 97/33899), AIM II (see, e.g., International Publication No. WO 97/34911), Fas Ligand (see, e.g., Takahashi et al., 1994, J. Immunol., 6:1567-1574), and VEGF (see, e.g., International Publication No. WO 99/23105), an anti-angiogenic agent, including, for example angiostatin, endostatin or a component of the coagulation pathway (e.g., tissue factor); or, a biological response modifier such as, for example, a lymphokine (e.g., interferon gamma, interleukin-1 (“IL-1”), interleukin-2 (“IL-2”), interleukin-5 (“IL-5”), interleukin-6 (“IL-6”), interleukin-7 (“IL-7”), interleukin 9 (“IL-9”), interleukin-10 (“IL-10”), interleukin-12 (“IL-12”), interleukin-15 (“IL-15”), interleukin-23 (“IL-23”), granulocyte macrophage colony stimulating factor (“GM-CSF”), and granulocyte colony stimulating factor (“G-CSF”)), or a growth factor (e.g., growth hormone (“GH”)), or a coagulation agent (e.g., calcium, vitamin K, tissue factors, such as but not limited to, Hageman factor (factor XII), high-molecular-weight kininogen (HMWK), prekallikrein (PK), coagulation proteins-factors II (prothrombin), factor V, XIIa, VIII, XIIIa, XI, XIa, IX, IXa, X, phospholipid, and fibrin monomer).

[0370] Also provided herein are antibodies that are recombinantly fused or chemically conjugated (covalent or non-covalent conjugations) to a heterologous protein or polypeptide (or fragment thereof, for example, to a polypeptide of about 10, about 20, about 30, about 40, about 50, about 60, about 70, about 80, about 90 or about 100 amino acids) to generate fusion proteins, as well as uses thereof. In particular, provided herein are fusion proteins comprising an antigen-binding fragment of an antibody provided herein (e.g., a Fab fragment, Fd fragment, Fv fragment, F(ab)₂ fragment, a VH domain, a VH CDR, a VL domain or a VL CDR) and a heterologous protein, polypeptide, or peptide. In one embodiment, the heterologous protein, polypeptide, or peptide that the antibody is fused to is useful for targeting the antibody to a particular cell type, such as a cell that expresses GFRAL. For example, an antibody that binds to a cell surface receptor expressed by a particular cell type (e.g., an immune cell) may be fused or conjugated to a modified antibody provided herein.

[0371] In addition, an antibody provided herein can be conjugated to therapeutic moieties such as a radioactive metal ion, such as alpha-emitters such as ²¹³Bi or macrocyclic chelators useful for conjugating radiometal ions, including but not limited to, ¹³¹In, ¹³¹LU, ¹³¹Y, ¹³¹Ho, ¹³¹Sm, to polypeptides. In certain embodiments, the macrocyclic chelator is 1, 4, 7, 10-tetraazacyclododecane-N,N′,N″, N′″-tetraacetic acid (DOTA) which can be attached to the antibody via a linker molecule. Such linker molecules are commonly known in the art and described, for example, in Denardo et al., 1998, Clin Cancer Res. 4 (10): 2483-90; Peterson et al., 1999, Bioconjug. Chem. 10 (4): 553-7; and Zimmerman et al., 1999, Nucl. Med. Biol. 26 (8): 943-50.

[0372] Moreover, antibodies provided herein can be fused to marker or “tag” sequences, such as a peptide to facilitate purification. In specific embodiments, the marker or tag amino acid sequence is a hexa-histidine peptide, such as the tag provided in a pQE vector (see, e.g., QIAGEN, Inc.), among others, many of which are commercially available. For example, as described in Gentz et al., 1989, Proc. Natl. Acad. Sci. USA 86:821-824, hexa-histidine provides for convenient purification of the fusion protein. Other peptide tags useful for purification include, but are not limited to, the hemagglutinin (“HA”) tag, which corresponds to an epitope derived from the influenza hemagglutinin protein (Wilson et al., 1984, Cell 37:767), and the “FLAG” tag.

[0373] Methods for fusing or conjugating therapeutic moieties (including polypeptides) to antibodies are well known, (see, e.g., Arnon et al., “Monoclonal Antibodies For Immunotargeting Of Drugs In Cancer Therapy”, in Monoclonal Antibodies And Cancer Therapy, Reisfeld et al. (eds.), pp. 243-56 (Alan R. Liss, Inc. 1985); Hellstrom et al., “Antibodies For Drug Delivery”, in Controlled Drug Delivery (2nd Ed.), Robinson et al. (eds.), pp. 623-53 (Marcel Dekker, Inc. 1987); Thorpe, “Antibody Carriers Of Cytotoxic Agents In Cancer Therapy: A Review”, in Monoclonal Antibodies 84: Biological And Clinical Applications, Pinchera et al. (eds.), pp. 475-506 (1985); “Analysis, Results, And Future Prospective Of The Therapeutic Use Of Radiolabeled Antibody In Cancer Therapy”, in Monoclonal Antibodies For Cancer Detection And Therapy, Baldwin et al. (eds.), pp. 303-16 (Academic Press 1985), Thorpe et al., 1982, Immunol. Rev. 62:119-58; U.S. Pat. Nos. 5,336,603, 5,622,929, 5,359,046, 5,349,053, 5,447,851, 5,723,125, 5,783,181, 5,908,626, 5,844,095, and 5,112,946; EP 307,434; EP 367,166; EP 394,827; PCT publications WO 91/06570, WO 96/04388, WO 96/22024, WO 97/34631, and WO 99/04813; Ashkenazi et al., Proc. Natl. Acad. Sci. USA, 88:10535-10539, 1991; Traunecker et al., Nature, 331:84-86, 1988; Zheng et al., J. Immunol., 154:5590-5600, 1995; Vil et al., Proc. Natl. Acad. Sci. USA, 89:11337-11341, 1992).

[0374] Fusion proteins may be generated, for example, through the techniques of gene-shuffling, motif-shuffling, exon-shuffling, and/or codon-shuffling (collectively referred to as “DNA shuffling”). DNA shuffling may be employed to alter the activities of anti-GFRAL antibodies as provided herein, including, for example, antibodies with higher affinities and lower dissociation rates (see, e.g., U.S. Pat. Nos. 5,605,793, 5,811,238, 5,830,721, 5,834,252, and 5,837,458; Patten et al., 1997, Curr. Opinion Biotechnol. 8:724-33; Harayama, 1998, Trends Biotechnol. 16 (2): 76-82; Hansson et al., 1999, J. Mol. Biol. 287:265-76; and Lorenzo and Blasco, 1998, Biotechniques 24 (2): 308-313). Antibodies, or the encoded antibodies, may be altered by being subjected to random mutagenesis by error-prone PCR, random nucleotide insertion or other methods prior to recombination. A polynucleotide encoding an antibody provided herein may be recombined with one or more components, motifs, sections, parts, domains, fragments, etc. of one or more heterologous molecules.

[0375] An antibody provided herein can also be conjugated to a second antibody to form an antibody heteroconjugate as described, for example, in U.S. Pat. No. 4,676,980.

[0376] The therapeutic moiety or drug conjugated or recombinantly fused to an antibody provided herein that binds to GFRAL (e.g., a GFRAL polypeptide, fragment, epitope) should be chosen to achieve the desired prophylactic or therapeutic effect(s). In certain embodiments, the antibody is a modified antibody. A clinician or other medical personnel may consider, for example, the following when deciding on which therapeutic moiety or drug to conjugate or recombinantly fuse to an antibody provided herein: the nature of the disease, the severity of the disease, and the condition of the subject.

[0377] Antibodies that bind to GFRAL as provided herein may also be attached to solid supports, which are particularly useful for immunoassays or purification of the target antigen. Such solid supports include, but are not limited to, glass, cellulose, polyacrylamide, nylon, polystyrene, polyvinyl chloride or polypropylene.

[0378] The linker may be a “cleavable linker” facilitating release of the conjugated agent in the cell, but non-cleavable linkers are also contemplated herein. Linkers for use in the conjugates of the present disclosure include without limitation acid labile linkers (e.g., hydrazone linkers), disulfide-containing linkers, peptidase-sensitive linkers (e.g., peptide linkers comprising amino acids, for example, valine and/or citrulline such as citrulline-valine or phenylalanine-lysine), photolabile linkers, dimethyl linkers (see, e.g., Chari et al., Cancer Research 52:127-131 (1992); U.S. Pat. No. 5,208,020), thioether linkers, or hydrophilic linkers designed to evade multidrug transporter-mediated resistance (see, e.g., Kovtun et al., Cancer Res. 70:2528-2537, 2010).

[0379] Conjugates of the antibody and agent may be made using a variety of bifunctional protein coupling agents such as BMPS, EMCS, GMBS, HBVS, LC-SMCC, MBS, MPBH, SBAP, SIA, SIAB, SMCC, SMPB, SMPH, sulfo-EMCS, sulfo-GMBS, sulfo-KMUS, sulfo-MBS, sulfo-SIAB, sulfo-SMCC, and sulfo-SMPB, and SVSB (succinimidyl-(4-vinylsulfone)benzoate). The present disclosure further contemplates that conjugates of antibodies and agents may be prepared using any suitable methods as disclosed in the art, (see, e.g., in Bioconjugate Techniques, 2nd Ed., G. T. Hermanson, ed., Elsevier, San Francisco, 2008).

[0380] Conventional conjugation strategies for antibodies and agents have been based on random conjugation chemistries involving the ε-amino group of Lys residues or the thiol group of Cys residues, which results in heterogenous conjugates. Recently developed techniques allow site-specific conjugation to antibodies, resulting in homogeneous loading and avoiding conjugate subpopulations with altered antigen-binding or pharmacokinetics. These include engineering of “thiomabs” comprising cysteine substitutions at positions on the heavy and light chains that provide reactive thiol groups and do not disrupt immunoglobulin folding and assembly or alter antigen binding (see, e.g., Junutula et al., J. Immunol. Meth. 332:41-52 (2008); Junutula et al., Nat. Biotechnol. 26:925-932, 2008). In another method, selenocysteine is cotranslationally inserted into an antibody sequence by recoding the stop codon UGA from termination to selenocysteine insertion, allowing site specific covalent conjugation at the nucleophilic selenol group of selenocysteine in the presence of the other natural amino acids (see, e.g., Hofer et al., Proc. Natl. Acad. Sci. USA 105:12451-12456 (2008); Hofer et al., Biochemistry 48 (50): 12047-12057, 2009).

### Pharmaceutical Formulations

[0381] Anti-GFRAL antibodies of the present disclosure may be administered by any route appropriate to the disease, disorder or condition to be treated. The antibody will typically be administered parenterally, for example, infusion, subcutaneous, intramuscular, intravenous, intradermal, intrathecal and epidural. The antibody dose will vary, including depending on the nature and/or severity of the disease or disorder as well as the condition of the subject, may include doses between 1 mg and 100 mg. Doses may also include those between 1 mg/kg and 15 mg/kg. In some embodiments, the dose is between about 5 mg/kg and about 7.5 mg/kg. In some embodiments, the dose is about 5 mg/kg. In some embodiments, the dose is about 7.5 mg/kg. Flat doses selected from the group consisting of: (a) 375-400 mg every two weeks and (b) 550-600 mg every three weeks. In some embodiments, the flat dose is 375-400 mg every two weeks. In some embodiments, the flat dose is 550-600 mg every three weeks. In some embodiments the flat dose is 400 mg every two weeks. In some embodiments the flat dose is 600 mg every three weeks. In some embodiments of sequential dosing, a first dose and a second dose are each between 1 mg/kg and 15 mg/kg with the second dose following the first does by between 1 and 4 weeks. In some embodiments, the first dose and the second dose are each between 5 mg/kg and 7.5 mg/kg and the second dose follows the first dose by between 2 and 3 weeks. In some embodiments, the first dose and the second dose are each 5 mg/kg and the second dose follows the first dose by 2 weeks. In some embodiments, the first dose and the second dose are each 7.5 mg/kg and the second dose follows the first dose by 3 weeks.

[0382] For treating diseases, disorders or conditions, the antibody in some embodiments is administered via intravenous infusion. The dosage administered via infusion is in the range of about 1 μg/m² to about 10,000 μg/m² per dose, generally one dose per week for a total of one, two, three or four doses. Alternatively, the dosage range is of about 1 μg/m² to about 1000 μg/m², about 1 μg/m² to about 800 μg/m², about 1 μg/m² to about 600 μg/m², about 1 μg/m² to about 400 μg/m²; alternatively, about 10 μg/m² to about 500 μg/m², about 10 μg/m² to about 300 μg/m², about 10 μg/m² to about 200 μg/m², and about 1 μg/m² to about 200 μg/m². The dose may be administered once per day, once per week, multiple times per week, but less than once per day, multiple times per month but less than once per day, multiple times per month but less than once per week, once per month or intermittently to relieve or alleviate symptoms of the disease, disorder, or condition. Administration may continue at any of the disclosed intervals until amelioration of the disease, disorder or condition, or amelioration of symptoms of the disease, disorder or condition being treated. Administration may continue after remission or relief of symptoms is achieved where such remission or relief is prolonged by such continued administration.

[0383] In one aspect, the present disclosure further provides pharmaceutical formulations comprising at least one anti-GFRAL antibody of the present disclosure. In some embodiments, a pharmaceutical formulation comprises 1) an anti-GFRAL antibody, and 2) a pharmaceutically acceptable carrier. In some embodiments, a pharmaceutical formulation comprises 1) an anti-GFRAL antibody and/or an immunoconjugate thereof, and optionally, 2) at least one additional therapeutic agent.

[0384] Pharmaceutical formulations comprising an antibody is prepared for storage by mixing the antibody having the desired degree of purity with optional physiologically acceptable carriers, excipients or stabilizers (see, e.g., Remington's Pharmaceutical Sciences 16th edition, Osol, A. Ed. (1980)) in the form of aqueous solutions or lyophilized or other dried formulations. The formulations herein may also contain more than one active compound as necessary for the particular disease, disorder or condition (e.g., a particular indication) being treated, preferably those with complementary activities that do not adversely affect each other. For example, in addition to an anti-GFRAL antibody, it may be desirable to include in the one formulation, an additional antibody, e.g., a second anti-GFRAL antibody which binds a different epitope on the GFRAL polypeptide, or an antibody to some other target. Alternatively, or additionally, the composition may further comprise another agent, including, for example, a chemotherapeutic agent, cytotoxic agent, cytokine, growth inhibitory agent, anti-hormonal agent, and/or cardioprotectant. In some embodiments the formulation includes an alkylating agent (e.g., chlorambucil, bendamustine hydrochloride or cyclophosphamide) a nucleoside analog (e.g., fludurabine, pentostatin, cladribine or cytarabine) a corticosteroid (e.g., prednisone, prednisolone or methylprednisolone), an immunomodulatory agent (e.g., lenalidomide), an antibiotic (e.g., doxorubicin, daunorubicin idarubicin or mitoxentrone), a synthetic flavon (e.g., flavopiridol), a Bcl2 antagonist, (e.g., oblimersen or ABT-263), a hypomethylating agent (e.g., azacytidine or decitabine), an FLT3 inhibitor (e.g., midostaurin, sorafenib and AC220). Such molecules are suitably present in combination in amounts that are effective for the purpose intended.

[0385] The antibodies of the present disclosure may be formulated in any suitable form for delivery to a target cell/tissue, for example, as microcapsules or macroemulsions (Remington's Pharmaceutical Sciences, 16th edition, Osol, A. Ed. (1980); Park et al., Molecules 10:146-161 (2005); Malik et al., Curr. Drug. Deliv. 4:141-151 (2007)); as sustained release formulations (Putney and Burke, Nature Biotechnol. 16:153-157, (1998)) or in liposomes (Maclean et al., Int. J. Oncol. 11:235-332 (1997); Kontermann, Curr. Opin. Mol. Ther. 8:39-45 (2006)).

[0386] An antibody provided herein can also be entrapped in microcapsule prepared, for example, by coacervation techniques or by interfacial polymerization, for example, hydroxymethylcellulose or gelatin-microcapsule and poly-(methylmethacylate) microcapsule, respectively, in colloidal drug delivery systems (for example, liposomes, albumin microspheres, microemulsions, nano-particles and nanocapsules) or in macroemulsions. Such techniques are disclosed, for example, in Remington's Pharmaceutical Sciences (1990) Mack Publishing Co., Easton, PA.

[0387] Various delivery systems are known and can be used to administer a prophylactic or therapeutic agent (e.g., an antibody that binds to GFRAL as described herein), including, but not limited to, encapsulation in liposomes, microparticles, microcapsules, recombinant cells capable of expressing the antibody, receptor-mediated endocytosis (see, e.g., Wu and Wu, J. Biol. Chem. 262:4429-4432 (1987)), construction of a nucleic acid as part of a retroviral or other vector, etc. In another embodiment, a prophylactic or therapeutic agent, or a composition provided herein can be delivered in a controlled release or sustained release system. In one embodiment, a pump may be used to achieve controlled or sustained release (see, e.g., Langer, supra; Sefton, 1987, CRC Crit. Ref. Biomed. Eng. 14:20; Buchwald et al., 1980, Surgery 88:507; Saudek et al., 1989, N. Engl. J. Med. 321:574). In another embodiment, polymeric materials can be used to achieve controlled or sustained release of a prophylactic or therapeutic agent (e.g., an antibody that binds to GFRAL as described herein) or a composition of the invention (see, e.g., Medical Applications of Controlled Release, Langer and Wise (eds.), CRC Pres., Boca Raton, Florida (1974); Controlled Drug Bioavailability, Drug Product Design and Performance, Smolen and Ball (eds.), Wiley, New York (1984); Ranger and Peppas, 1983, J., Macromol. Sci. Rev. Macromol. Chem. 23:61; see also Levy et al., 1985, Science 228:190; During et al., 1989, Ann. Neurol. 25:351; Howard et al., 1989, J. Neurosurg. 7 1:105); U.S. Pat. Nos. 5,679,377; 5,916,597; 5,912,015; 5,989,463; 5,128,326; PCT Publication No. WO 99/15154; and PCT Publication No. WO 99/20253). Examples of polymers used in sustained release formulations include, but are not limited to, poly(2-hydroxy ethyl methacrylate), poly(methyl methacrylate), poly(acrylic acid), poly(ethylene-co-vinyl acetate), poly(methacrylic acid), polyglycolides (PLG), polyanhydrides, poly(N-vinyl pyrrolidone), poly(vinyl alcohol), polyacrylamide, poly(ethylene glycol), polylactides (PLA), poly(lactide-co-glycolides) (PLGA), and polyorthoesters. In one embodiment, the polymer used in a sustained release formulation is inert, free of leachable impurities, stable on storage, sterile, and biodegradable.

[0388] In yet another embodiment, a controlled or sustained release system can be placed in proximity of the therapeutic target, for example, the nasal passages or lungs, thus requiring only a fraction of the systemic dose (see, e.g., Goodson, in Medical Applications of Controlled Release, supra, vol. 2, pp. 115-138 (1984)). Controlled release systems are discussed, for example, by Langer (1990, Science 249:1527-1533). Any technique known to one of skill in the art can be used to produce sustained release formulations comprising one or more antibodies that bind to GFRAL as described herein. (See, e.g., U.S. Pat. No. 4,526,938, PCT publication WO 91/05548, PCT publication WO 96/20698, Ning et al., 1996, “Intratumoral Radioimmunotherapy of a Human Colon Cancer Xenograft Using a Sustained-Release Gel,” Radiotherapy & Oncology 39:179-189, Song et al., 1995, “Antibody Mediated Lung Targeting of Long-Circulating Emulsions,” PDA Journal of Pharmaceutical Science & Technology 50:372-397, Cleek et al., 1997, “Biodegradable Polymeric Carriers for a bFGF Antibody for Cardiovascular Application,” Pro. Int'l. Symp. Control. Rel. Bioact. Mater. 24:853-854, and Lam et al., 1997, “Microencapsulation of Recombinant Humanized Monoclonal Antibody for Local Delivery,” Proc. Int'l. Symp. Control Rel. Bioact. Mater. 24:759-760).

[0389] Additional delivery systems can be used to administer a prophylactic or therapeutic agent (e.g., an antibody that binds to GFRAL as described herein) including, but not limited to, injectable drug delivery devices. Injectable drug delivery devices for anti-GFRAL antibodies include, for example, hand-held devices or wearable devices. Hand-held devices useful for anti-GFRAL antibodies include autoinjectors, such as the FLEXIQ-DV (Elcam Medical) or PRO-JECT (Aptar Pharma) autoinjectors. Wearable devices useful for anti-GFRAL antibodies include, for example, on-body drug delivery systems, such as the NEULASTA drug delivery kit (Amgen). Injectable drug delivery devices for anti-GFRAL antibodies can contain the antibody as a prophyactic or therapeutic agent, for example, in prefilled syringes, cartridges or vials. Injectable drug delivery devices (e.g., autoinjectors) and/or their containers (e.g., syringes, cartridges or vials) for anti-GFRAL antibodies can be disposable. Exemplary injectable devices useful for anti-GFRAL antibodies are described in WO2014/081780.

[0390] In some embodiments, additional drug delivery systems can be used to administer a prophylactic or therapeutic agent (e.g., an antibody that binds to GFRAL as described herein) including, but not limited to, osmotic pumps. Different types of osmotic pump systems for anti-GFRAL antibodies can be used, including, for example, single compartment systems, dual compartment systems, and multiple compartment systems. Exemplary osmotic pump systems useful for anti-GFRAL antibodies are described, for example, in Herrlich et al. (2012) Advanced Drug Delivery Reviews 64, 1617-1627. In some embodiments, the osmotic pump for anti-GFRAL antibodies can include implantable drug-dispensing osmotic pumps such as the DUROS pump.

### Therapeutic Methods

[0391] An anti-GFRAL antibody of the present disclosure may be used in, for example, therapeutic methods.

[0392] In some embodiments, the present disclosure provides methods for treating or preventing a GDF15-mediated disease, disorder, or condition, wherein the method comprises administering an anti-GFRAL antibody or fragment thereof described herein to a subject suffering from a GDF15-mediated disease, disorder or condition. Additionally, the subject can be administered a pharmaceutical composition comprising an anti-GFRAL antibody or fragment thereof described herein.

[0393] In some embodiments, present disclosure provides a method to treat a subject suffering from involuntary weight loss. An example of a suitable subject may be one who is diagnosed with a wasting disease or cachexia. Suitable patients include those suffering from liver cirrhosis, hyperthyroidism, chronic kidney disease, Parkinson's disease, cancer, eating disorder (e.g., anorexia nervosa), chronic inflammatory disease (e.g., rheumatoid arthritis), sepsis or other forms of systemic inflammation, chronic obstructive pulmonary disease, AIDS, tuberculosis, and muscle wasting, such as muscular dystrophy or multiple sclerosis), or sarcopenia.

[0394] In some embodiments, the present disclosure also provides methods for preventing involuntary weight loss in a subject who may be at risk of involuntary weight loss due to a chronic disease, such as, liver cirrhosis, hyperthyroidism, chronic kidney disease, Parkinson's disease, cancer, eating disorder (e.g., anorexia nervosa), chronic inflammatory disease (e.g., rheumatoid arthritis), sepsis or other forms of systemic inflammation, chronic obstructive pulmonary disease, AIDS, tuberculosis, and muscle wasting, such as muscular dystrophy or multiple sclerosis), or sarcopenia. Such subjects may include subjects who have elevated levels of GDF15, are undergoing treatment for cancer, and the like.

[0395] In some embodiments, the present disclosure provides a method to treat a subject suffering from cachexia. An example of a suitable subject is one who is diagnosed with cachexia. The present disclosure also provides methods for preventing involuntary weight loss in a subject who may be at risk of involuntary weight loss due to onset of cachexia. Such subjects include subjects who have elevated levels of GDF15, have cancer, are undergoing treatment for cancer, have an eating disorder, and the like.

[0396] Also disclosed is a method for modulating GDF15 activity in a patient having elevated GDF15 activity. As used herein, “elevated GDF15 activity” refers to increased activity or amount of GDF15 in a biological fluid of a subject in comparison to a normal subject. A number of conditions are associated with increased GDF15 serum level, wherein the increased GDF15 results in a number of symptoms such as appetite loss, weight loss, and the like. Examples of conditions associated with increased GDF15 serum level include cancer, e.g., melanoma, gastric cancer, pancreatic cancer, prostate cancer; autoimmune diseases such as, arthritis and inflammation; cardiovascular diseases like atherosclerosis, heart failure, hypertension, myocardial infarction, chest pain, and cardiovascular events; metabolic diseases like anemia, cachexia, anorexia, kidney disease, and thalassemia, etc.

[0397] A subject having any of the above diseases, disorders or conditions is a suitable candidate for receiving an anti-GFRAL antibody or fragment thereof described herein, or a combination of a therapeutic agent and the anti-GFRAL antibody or fragment thereof.

[0398] Administering the subject an anti-GFRAL antibody or fragment thereof to such a subject can decrease or prevent one or more of the symptoms associated with a GDF15-mediated disease, disorder or condition. For example, administering an anti-GFRAL antibody or fragment thereof of the present disclosure can increase body weight and/or appetite in a subject. As another example, administering an anti-GFRAL antibody or fragment thereof of the present disclosure can maintain body weight in a subject or reduce body weight loss is a subject.

[0399] In one aspect, methods are provided for treating a disease, disorder or condition comprising administering to an individual an effective amount of an anti-GFRAL antibody or fragment thereof. In certain embodiments, a method for treating a disease, disorder, or condition comprises administering to an individual an effective amount of a pharmaceutical formulation comprising an anti-GFRAL antibody and, optionally, at least one additional therapeutic agent, such as those described herein.

[0400] An anti-GFRAL antibody or fragment thereof can be administered to a human for therapeutic purposes. Moreover, an anti-GFRAL antibody or fragment thereof can be administered to a non-human mammal expressing GFRAL with which the antibody cross-reacts (e.g., a primate, pig, rat, or mouse) for veterinary purposes or as an animal model of human disease. Regarding the latter, such animal models may be useful for evaluating the therapeutic efficacy of antibodies of the present disclosure (e.g., testing of dosages and time courses of administration).

[0401] Antibodies of the present disclosure can be used either alone or in combination with other compositions in a therapy. For example, an anti-GFRAL antibody of the present disclosure may be co-administered with at least one additional therapeutic agent and/or adjuvant. In some embodiments, the additional compound is a therapeutic antibody other than an anti-GFRAL antibody.

[0402] Such combination therapies noted above encompass combined administration (where two or more therapeutic agents are included in the same or separate formulations), and separate administration, in which case, administration of an anti-GFRAL antibody or fragment thereof of the present disclosure can occur prior to, simultaneously, and/or following, administration of the additional therapeutic agent and/or adjuvant. Antibodies of the present disclosure can also be used in combination with additional therapeutic regimens including, without limitation, those described herein.

[0403] An anti-GFRAL antibody of the present disclosure (and any additional therapeutic agent or adjuvant) can be administered by any suitable means, including parenteral, subcutaneous, intraperitoneal, intrapulmonary, and intranasal, and, if desired for local treatment, intralesional administration. Parenteral infusions include intramuscular, intravenous, intraarterial, intraperitoneal, or subcutaneous administration. In addition, the antibody or conjugate is suitably administered by pulse infusion, particularly with declining doses of the antibody or fragment thereof. Dosing can be by any suitable route, for example, by injections, such as intravenous or subcutaneous injections, depending in part on whether the administration is brief or chronic.

[0404] Antibodies of the present disclosure would be formulated, dosed, and administered in a fashion consistent with good medical practice. Factors for consideration in this context include the particular disorder being treated, the particular mammal being treated, the clinical condition of the individual subject, the cause of the disorder, the site of delivery of the agent, the method of administration, the scheduling of administration, and other factors known to medical practitioners. The anti-GFRAL antibody need not be, but is optionally formulated with one or more agents currently used to prevent or treat the disorder in question. The effective amount of such other agents depends on the amount of antibody or immunoconjugate present in the formulation, the type of disorder or treatment, and other factors discussed above. These are generally used in the same dosages and with administration routes as described herein, or about from 1 to 99% of the dosages described herein, or in any dosage and by any route that is empirically/clinically determined to be appropriate.

[0405] For the prevention or treatment of a disease, disorder, or condition, the appropriate dosage of an anti-GFRAL antibody or fragment thereof of the present disclosure (when used alone or in combination with one or more other additional therapeutic agents, such as agents described herein) will depend on the type of disease, disorder, or condition, to be treated, the type of antibody, the severity and course of the disease, disorder, or condition, whether the antibody is administered for preventive or therapeutic purposes, previous therapy, the subject's clinical history and response to the antibody, and the discretion of the attending physician. The anti-GFRAL antibody or fragment thereof is suitably administered to the subject at one time or over a series of treatments. Depending on the type and severity of the disease, about 1 μg/kg to 100 mg/kg (e.g., 0.1 mg/kg-20 mg/kg, 1 mg/kg-15 mg/kg, etc.) of antibody or fragment thereof can be an initial candidate dosage for administration to the subject, whether, for example, by one or more separate administrations, or by continuous infusion. One typical daily dosage might range from about 1 μg/kg to 100 mg/kg or more, depending on the factors mentioned above. For repeated administrations over several days or longer, depending on the condition, the treatment would generally be sustained until a desired suppression of disease symptoms occurs. Exemplary dosages of the antibody or fragment thereof may be in the range from about 0.05 mg/kg to about 10.0 mg/kg. Thus, one or more doses of about 0.5 mg/kg, 1.0 mg/kg, 2.0 mg/kg, 3.0 mg/kg, 4.0 mg/kg, 5.0 mg/kg, 6.0 mg/kg, 7.0 mg/kg, 8.0 mg/kg, 9.0 mg/kg, or 10.0 mg/kg (or any combination thereof) of antibody may be administered to the subject. Such doses may be administered intermittently, e.g., every week or every three weeks (e.g., such that the subject receives from about two to about twenty, or e.g., about six doses of the antibody). An initial higher loading dose, followed by one or more lower doses may be administered. An exemplary dosing regimen comprises administering an initial loading dose, followed by a maintenance dose (e.g., weekly) of the antibody or fragment thereof. The initial loading dose may be greater than the maintenance dose. However, other dosage regimens may be useful. The progress of this therapy is easily monitored by conventional techniques and assays.

[0406] In some embodiments, the method described herein involves administering the subject an anti-GFRAL antibody or fragment thereof to a patient who has involuntary body weight loss or is at risk of developing involuntary body weight loss. The subject methods include administering an anti-GFRAL antibody or fragment thereof disclosed herein to a subject who has elevated serum levels of GDF15. In certain embodiment, the antibody or fragment thereof is an anti-GFRAL antibody that competes with GDF15 for binding to extracellular domain of GFRAL. In certain embodiments, the antibody or fragment thereof binds to an extracellular domain of a GFRAL protein but does not activate RET. For example, the antibody or fragment thereof is an anti-GFRAL antibody that competes with GDF15 for binding to extracellular domain of GFRAL but does not activate RET upon binding to GFRAL. Such an antibody is described herein.

[0407] In the methods of the present disclosure, anti-GFRAL antibodies or fragments thereof described herein or pharmaceutical compositions comprising said antibodies or fragments thereof can be administered to a subject (e.g., a human patient) to, for example, achieve a target body weight and/or maintain body weight; achieve a target body mass index (BMI) and/or maintain a BMI; increase appetite; and the like. A normal human adult has a BMI in the range 18.5-24.9 Kg/m². The subject treatment methods can increase body weight, BMI, muscle weight, and/or food intake in a patient by at least about 5%, e.g., 10%, 15%, 20%, 25%, 30%, 35%, 40%, 45%, 50% or more.

[0408] The methods relating to treatment or prevention of a GDF15-mediated disease, disorder or condition (e.g., involuntary weight loss) described herein include, for example, use of an anti-GFRAL antibody or fragment thereof described herein for therapy/prevention alone or in combination with other types of therapy. The method involves administering to a subject the anti-GFRAL antibody or fragment thereof and another agent.

[0409] In some embodiments, the agent is administered to a patient experiencing loss of muscle mass, for example, loss of muscle mass associated with an underlying disease. Underlying diseases associated with cachexia include, but are not limited to, cancer, chronic renal disease, chronic obstructive pulmonary disease, AIDS, tuberculosis, chronic inflammatory diseases, sepsis and other forms of systemic inflammation, muscle wasting, such as muscular dystrophy, and the eating disorder known as anorexia nervosa. In some embodiments, the agent inhibits loss of lean mass (e.g., muscle mass) and or fat mass by at least 40%, 50%, 60%, 70%, 80%, 90%, 95%, 98%, 99%, or 100%.

[0410] In some embodiments, a loss of lean mass (e.g., muscle mass) is accompanied by a loss of fat mass. In some embodiments, the agent can inhibit loss of fat mass by at least 40%, 50%, 60%, 70%, 80%, 90%, 95%, 98%, 99%, or 100%.

[0411] In some embodiments, the agent is administered to a patient diagnosed with body weight loss (e.g., involuntary weight loss). In some embodiments, the agent can revert body weight loss (e.g., involuntary weight loss) by at least 2%, 5%, 10%, 15%, 20%, 25%, 30% or 35%.

[0412] In some embodiments, the agent is administered to a patient diagnosed with loss of organ mass, for example, loss of organ mass associated with an underlying disease. Underlying diseases associated with cachexia include, but are not limited to, cancer, chronic renal disease, chronic obstructive pulmonary disease, AIDS, tuberculosis, chronic inflammatory diseases, sepsis and other forms of systemic inflammation, muscle wasting, such as muscular dystrophy, and the eating disorder known as anorexia nervosa. In some embodiments, the agent can inhibit loss of organ mass by at least 40%, 50%, 60%, 70%, 80%, 90%, 95%, 98%, 99%, or 100%. In some embodiments, loss of organ mass is observed in heart, liver, kidney, and/or spleen. In some embodiments, the loss of organ mass in accompanied by a loss of muscle mass, a loss of fat mass and/or involuntary weight loss.

[0413] Sarcopenia, muscle wasting disorders and significant muscle weight loss can occur in the absence of cachexia, decreased appetite or body weight loss. In some embodiments, the agent can be used to treat a subject diagnosed with sarcopenia, a muscle wasting disorder and/or significant muscle weight loss, whether or not the subject has, or has been diagnosed with, cachexia or decreased appetite. Such a method comprises administering a therapeutically effective amount of one or more agents to a subject in need thereof.

[0414] Any of a wide variety of therapies directed to treating or preventing cachexia can be combined in a composition or therapeutic method with the subject proteins.

[0415] Where the GFRAL-ECD protein is administered in combination with one or more other therapies, the combination can be administered anywhere from simultaneously to up to 5 hours or more, e.g., 10 hours, 15 hours, 20 hours or more, prior to or after administration of a subject protein. In certain embodiments, a subject protein and other therapeutic intervention are administered or applied sequentially, e.g., where a subject protein is administered before or after another therapeutic treatment. In yet other embodiments, a subject protein and other therapy are administered simultaneously, e.g., where a subject protein and a second therapy are administered at the same time, e.g., when the second therapy is a drug it can be administered along with a subject protein as two separate formulations or combined into a single composition that is administered to the subject. Regardless of whether administered sequentially or simultaneously, as illustrated above, the treatments are considered to be administered together or in combination for purposes of the present disclosure.

[0416] Cytokines that are implicated in cachexia include Activin A and IL-6. Increased activin levels have been associated with cancer-associated cachexia and gonadal tumors. See, e.g., Marino et al. (2013) CYTOKINE & GROWTH FACTOR REV. 24:477-484. Activin A is a member of the TGF-beta family, and is a ligand of the activin type 2 receptor, ActRIIB. See, e.g., Zhou et al. (2010) CELL 142:531-543. Circulating levels of IL-6 have been shown to correlate with weight loss in cancer patients, as well as with reduced survival. See, e.g., Fearon et al. (2012) CELL METABOLISM 16:153-166.

[0417] Accordingly, in some embodiments, one or more inhibitors of Activin-A or the Activin-A receptor, ActRIIB, IL-6 or the IL-6 receptor (IL-6R), can be administered in combination with (for example, administered at the same time as, administered before, or administered after) an anti-GFRAL antibody or fragment thereof described herein. Exemplary inhibitors of Activin A or ActRIIB, include, for example, an anti-Activin-A antibody or an antigen binding fragment thereof, an anti-ActRIIB antibody or an antigen binding fragment thereof, a small molecule inhibitor of Activin-A, a small molecule inhibitor of ActRIIB, and a ‘decoy’ receptor of ActRIIB, such as a soluble ActRIIB receptor and a fusion of the soluble ActRIIB receptor with an Fc molecule (ActRIIB-Fc). See, e.g., Zhou et al. (2010), supra. Suitable inhibitors of IL-6 or IL-6R, include an anti-IL-6 antibody or an antigen binding fragment thereof, an anti-IL-6R antibody or an antigen binding fragment thereof, a small molecule inhibitor of IL-6, a small molecule inhibitor of IL-6R, and a ‘decoy’ receptor of IL-6R, such as a soluble IL-6 receptor and a fusion of the soluble IL-6 receptor with an Fc molecule (IL6R-Fc). See, e.g., Enomoto et al. (2004) BIOCHEM. AND BIOPHYS. RES. COMM. 323:1096-1102; Argiles et al. (2011) EUR. J. PHARMACOL. 668: S81-S86; Tuca et al. (2013) ONCOLOGY/HEMATOLOGY 88:625-636. Suitable inhibitors of IL-6 or IL-6R can include, e.g., Tocilizumab (Actemra®, Hoffmann-LaRoche), a humanized anti-IL-6R monoclonal antibody approved for treatment of rheumatoid arthritis, and Sarilumab/REGN88 (Regeneron), a humanized anti-IL6R antibody in clinical development for treatment of rheumatoid arthritis; and Selumetinib/AZD6244 (AstraZeneca), an allosteric inhibitor of MEK, which has been shown to inhibit IL-6 production. Prado et al. (2012) BRITISH J. CANCER 106:1583-1586.

[0418] TNFα and IL-1 are cytokines known to be involved in mediation of the proinflammatory response, which are also implicated in muscle depletion, anorexia and cachexia. Increased circulating levels of TNFα appear to inhibit myogenesis. TNFα, also known as “cachectin,” stimulates interleukin-1 secretion and is implicated in the induction of cachexia. IL-1 is a potent trigger of the acute-phase inflammatory response, and it has been shown that infusion of IL-1 can lead to marked weight loss and appetite loss. IL-1 has been shown to contribute to the initiation of cancer cachexia in mice bearing a murine colon-26 adenocarcinoma (Strassmann et al. (1993) J. IMMUNOL. 150:2341). See also, Mathys and Billiau (1997) NUTRITION 13:763-770; Fong et al. (1989) AM. J. PHYSIOL.-REGULATORY, INTEGRATIVE AND COMPARATIVE PHYSIOL., 256:R659-R665. Thus, TNFα inhibitors and IL-1 inhibitors that are used in the treatment of rheumatoid arthritis may also be useful in the treatment of cachexia.

[0419] Accordingly, in some embodiments, one or more inhibitors of TNFα or IL-1 can be administered in combination with (e.g., administered at the same time as, administered before, or administered after) an anti-GFRAL antibody or fragment thereof described herein. Suitable inhibitors of TNFα or IL-1 include an anti-TNFα antibody or an antigen binding fragment thereof, an anti-IL-1 antibody or an antigen binding fragment thereof, a small molecule inhibitor of TNFα or IL-1, and a ‘decoy’ receptor of TNFα or IL-1, such as a soluble TNFα or IL-1 receptor and a fusion of the soluble form of TNFα or IL-1 with an Fc molecule. Suitable inhibitors of TNFα include for example, etanercept (Enbrel®, Pfizer/Amgen), infliximab (Remicade®, Janssen Biotech), adalimumab (Humira®, Abbvie), golimumab (Simponi®, Johnson and Johnson/Merck), and certolizumab pegol (Cimzia®, UCB). Suitable IL-1 inhibitors include, e.g., Xilonix® antibody that targets IL-1 a (Xbiotech), 231ccurred (Kinaret®, Amgen), canakinumab (Ilaris®, Novartis), and rilonacept (Arcalyst®, Regeneron). In certain embodiments, the TNFα inhibitor or IL-1 inhibitor, which is typically administered systemically for the treatment of rheumatoid arthritis may be administered locally and directly to the tumor site.

[0420] Myostatin, also known as GDF-8, is a member of the TGF-β family of peptides that is a negative regulator of muscle mass, as shown by increased muscle mass in myostatin deficient mammals. Myostatin is a ligand of the activin type 2 receptor, ActRIIB.

[0421] Accordingly, in some embodiments, one or more inhibitors of myostatin or its receptor may be administered in combination with (for example, administered at the same time as, administered before, or administered after) an anti-GFRAL antibody or fragment thereof described herein. Suitable inhibitors of myostatin or ActRIIB, include an anti-myostatin antibody or an antigen binding fragment thereof, an anti-ActRIIB antibody or an antigen binding fragment thereof, a small molecule inhibitor of myostatin, a small molecule inhibitor of ActRIIB, and a ‘decoy’ receptor of GDF-8, such as a soluble ActRIIB and a fusion of the soluble form of ActRIIB with an Fc molecule. See, e.g., Lokireddy et al. (2012) BIOCHEM. J. 446 (I): 23-26. Myostatin inhibitors that may be suitable for the present methods include REGN1033 (Regeneron); see Bauerlein et al. (2013) J. CACHEXIA SARCOPENIA MUSCLE: Abstracts of the 7^{th} Cachexia Conference, Kobe/Osaka, Japan, Dec. 9-11, 2013, Abstract 4-06; LY2495655 (Lilly), a humanized anti-myostatin antibody in clinical development by Eli Lilly; see also “A PHASE 2 STUDY OF LY2495655 IN PARTICIPANTS WITH PANCREATIC CANCER,” available on the world wide web at clinicaltrials.gov/ct2/NCT01505530; NML identifier: NCT01505530; ACE-031 (Acceleron Pharma); and stamulumab (Pfizer).

[0422] Agents such as Ghrelin or ghrelin mimetics, or other growth hormone secretagogues (GHS) which are able to activate the GHS receptor (GHS-RIa), also known as the ghrelin receptor, can be useful for increasing food intake and body weight in humans. See Guillory et al. (2013) in VITAMINS AND HORMONES vol. 92, chap. 3; and Steinman and DeBoer (2013) VITAMINS AND HORMONES vol. 92, chap. 8. Accordingly, in some embodiments, one or more Ghrelin or ghrelin mimetics, or other growth hormone secretagogues (GHS), can be administered in combination with (for example, administered at the same time as, administered before, or administered after) an anti-GFRAL antibody or fragment thereof described herein. Suitable ghrelin mimetics include anamorelin (Helsinn, Lugano, CH); see Temel et al. (2013) J. CACHEXIA SARCOPENIA MUSCLE: Abstracts of the 7th Cachexia Conference, Kobe/Osaka, Japan, Dec. 9-11, 2013, Abstract 5-01. Other suitable GHS molecules can be identified, for example, using the growth hormone secretagogue receptor Ghrelin competition assay described in PCT Publication Nos. WO2011/117254 and WO2012/113103.

[0423] Agonists of the androgen receptor, including small molecules and other selective androgen receptor modulators (SARMs) can be useful in treating cachexia and/or sarcopenia. See, e.g., Mohler et al. (2009) J. MED. CHEM. 52:3597-3617; Nagata et al. (2011) BIOORGANIC AND MED. CHEM. LETTERS 21:1744-1747; and Chen et al. (2005) MOL. INTERV. 5:173-188. Ideally, SARMs should act as full agonists, like testosterone, in anabolic target tissues, such as muscle and bone, but should demonstrate only partial or pure androgen receptor antagonistic activities on prostate tissue. See, e.g., Bovee et al. (2010) J. STEROID BIOCHEM. & MOL. BIOL. 118:85-92. Suitable SARMs can be identified, e.g., by use of the methods and assays described in Zhang et al. (2006) BIOORG. MED. CHEM. LETT. 16:5763-5766; and Zhang et al. (2007) BIOORG. MED. CHEM. LETT. 17:439-443.

[0424] Accordingly, in some embodiments, one or more androgen receptor agonists can be administered in combination with (for example, administered at the same time as, administered before, or administered after) an anti-GFRAL antibody or fragment thereof described herein. Suitable SARMs include, for example, GTx-024 (enobosarm, Ostarine®, GTX, Inc.), a SARM in phase II clinical development by GTx, Inc. See also, Dalton et al. (2011) J. CACHEXIA SARCOPENIA MUSCLE 2:153-161. Other suitable SARMs include 2-(2,2,2)-trifluoroethyl-benzimidazoles (Ng et al. (2007) BIOORG. MED. CHEM. LETT. 17:1784-1787) and JNJ-26146900 (Allan et al. (2007) J. STEROID BIOCHEM. & MOL. BIOL. 103:76-83).

[0425] β-adrenergic receptor blockers, or beta-blockers, have been studied for their effect on body weight in cachexia subjects, and have been associated with partial reversal of cachexia in patients with congestive heart failure. See, e.g., Hryniewicz et al. (2003) J. CARDIAC FAILURE 9:464-468. Beta-blocker MT-102 (PsiOxus Therapeutics, Ltd.) has been evaluated in a phase 2 clinical trial for subjects with cancer cachexia. See Coats et al. (2011) J. CACHEXIA SARCOPENIA MUSCLE 2:201-207. Accordingly, in some embodiments, one or more β-adrenergic receptor blockers, or beta-blockers, can be administered in combination with (for example, administered at the same time as, administered before, or administered after) an anti-GFRAL antibody or fragment thereof described herein.

[0426] Melanocortin receptor-knockout mice with a genetic defect in melanocortin signaling exhibit a phenotype opposite that of cachexia: increased appetite, increased lean body mass, and decreased metabolism. Thus, melanocortin antagonism has emerged as a potential treatment for cachexia associated with chronic disease (DeBoer and Marks (2006) TRENDS IN ENDOCRINOLOGY AND METABOLISM 17:199-204).

[0427] Accordingly, in some embodiments, one or more inhibitors of a melanocortin peptide or a melanocortin receptor can be administered in combination (e.g., administered at the same time as, administered before, or administered after) with an anti-GFRAL antibody or fragment thereof described herein. Suitable inhibitors of melanocortins or melanocortin receptors include an anti-melanocortin peptide antibody or an antigen binding fragment thereof, an anti-melanocortin receptor antibody or an antigen binding fragment thereof, a small molecule inhibitor of a melanocortin peptide, a small molecule inhibitor of a melanocortin receptor, and a ‘decoy’ receptor of a melanocortin receptor, such as soluble melanocortin receptor and a fusion of a soluble melanocortin receptor with an Fc molecule. Suitable melacortin receptor inhibitors include, for example, the melanocortin receptor antagonist agouri-related peptide (AgRP (83-132)), which has been demonstrated to prevent cachexia-related symptoms in a mouse model of cancer-related cachexia (Joppa et al. (2007) PEPTIDES 28:636-642).

[0428] Anti-cancer agents, especially those that can cause cachexia and elevate GDF15 levels, such as cisplatin, can be used in methods of the present disclosure in combination with (for example, administered at the same time as, administered before, or administered after) an anti-GFRAL antibody or fragment thereof described herein. Many cancer patients are weakened by harsh courses of radio- and/or chemotherapy, which can limit the ability of the patient to tolerate such therapies, and hence restrict the dosage regimen. Certain cancer agents themselves, such as fluorouracil, 234ccurred234234, methotrexate and cisplatin, can contribute to cachexia, for example by inducing severe gastrointestinal complications. See, e.g., Inui (2002) CANCER J. FOR CLINICIANS 52:72-91. By the methods of the present disclosure, in which an anti-cancer agent is administered in combination with an anti-GFRAL antibody of the disclosure, it is possible to decrease the incidence and/or severity of cachexia, and ultimately increase the maximum tolerated dose of such an anti-cancer agent. Accordingly, efficacy of treatment with anti-cancer agents that can cause cachexia can be improved by reducing the incidence of cachexia as a dose-limiting adverse effect, and by allowing administration of higher doses of a given anticancer agent.

[0429] Thus, provided herein are pharmaceutical compositions comprising an anti-GFRAL antibody or fragment thereof described herein in combination with an agent selected from the group consisting of an inhibitor of Activin-A, an inhibitor of ActRIIB, an inhibitor of IL-6 or an inhibitor of IL-6R, a ghrelin, a ghrelin mimetic or a GHS-RIa agonist, a SARM, a TNFα inhibitor, an IL-Iα inhibitor, a myostatin inhibitor, a beta-blocker, a melanocortin peptide inhibitor, a melanocortin receptor inhibitor, and an anti-cancer agent. The present disclosure also includes methods of treating, preventing or minimizing cachexia and/or sarcopenia in a mammal comprising administering to a mammal in need thereof a pharmaceutical composition or compositions comprising an effective amount of an anti-GFRAL antibody of the disclosure in combination with an effective amount of an inhibitor of Activin-A, an inhibitor of ActRIIB, an inhibitor of IL-6 or an inhibitor of IL-6R, a ghrelin, a ghrelin mimetic or a GHS-RIa agonist, a SARM, a TNFα inhibitor, an IL-Iα inhibitor, a myostatin inhibitor, a beta-blocker, a melanocortin peptide inhibitor, or a melanocortin receptor inhibitor.

[0430] In another aspect, provided herein is a method of inhibiting loss of muscle mass associated with an underlying disease comprising administering to a mammal in need thereof a pharmaceutical composition or compositions comprising an effective amount of an anti-GFRAL antibody or fragment thereof described herein in combination with an effective amount of an inhibitor of Activin-A, an inhibitor of ActRIIB, an inhibitor of IL-6 or an inhibitor of IL-6R, a ghrelin, a ghrelin mimetic or a GHS-RIa agonist, a SARM, a TNFα inhibitor, an IL-Iα inhibitor, a myostatin inhibitor, a beta-blocker, a melanocortin peptide inhibitor, or a melanocortin receptor inhibitor to prevent or reduce loss of muscle mass. The underlying disease can be selected from the group consisting of cancer, chronic heart failure, chronic kidney disease, chronic obstructive 235ccurred235 disease, AIDS, multiple sclerosis, rheumatoid arthritis, sepsis, and tuberculosis. Additionally, in some embodiments, the loss of muscle mass is accompanied by a loss of fat mass.

[0431] In another aspect, provided herein is a method of inhibiting or reducing involuntary weight loss in a mammal comprising administering to a mammal in need thereof a pharmaceutical composition or pharmaceutical compositions comprising an effective amount of an anti-GFRAL antibody of the disclosure in combination with an effective amount of an inhibitor of Activin-A, an inhibitor of ActRIIB, an inhibitor of IL-6 or an inhibitor of IL-6R, a ghrelin, a ghrelin mimetic or a GHS-RIa agonist, a SARM, a TNFα inhibitor, a IL-Iα inhibitor, a myostatin inhibitor, a beta-blocker, a melanocortin peptide inhibitor, or a melanocortin receptor inhibitor.

[0432] Certain anti-cancer agents, such as cisplatin, have one or more undesirable adverse effects that involve causing or increasing one or more syndromes such as cachexia, sarcopenia, muscle wasting, bone wasting or involuntary body weight loss. Accordingly, in another aspect, provided herein is a method of treating cancer, while preventing, minimizing or reducing the occurrence, frequency or severity of cachexia, sarcopenia, or muscle wasting, bone wasting or involuntary loss of body weight in a mammal, comprising administering to a mammal in need thereof a pharmaceutical composition comprising an effective amount of an anti-GFRAL antibody or fragment thereof described herein in combination with one or more anti-cancer agents. In some embodiments, the method of treating cancer, while preventing, minimizing or reducing the236ccurrednce, frequency or severity of cachexia, sarcopenia or muscle wasting, bone wasting or involuntary loss of body weight in a mammal, comprises administering to a mammal in need thereof a pharmaceutical composition comprising an effective amount of an anti-GFRAL antibody or fragment thereof described herein in combination with one or more anti-cancer agents known to cause or increase the occurrence, frequency or severity of cachexia, sarcopenia, or muscle wasting, bone wasting or involuntary loss of body weight in a mammal.

### Diagostic Methods and Methods of Detection

[0433] In one aspect, anti-GFRAL antibodies and fragments thereof of the present disclosure are useful for detecting the presence of GFRAL in a biological sample. Such anti-GFRAL antibodies can include those that bind to human GFRAL. The term “detecting” as used herein encompasses quantitative or qualitative detection. In certain embodiments, a biological sample comprises a cell or tissue.

[0434] In one aspect, the present disclosure provides a method of detecting the presence of GFRAL in a biological sample. In certain embodiments, the method comprises contacting the biological sample with an anti-GFRAL antibody under conditions permissive for binding of the anti-GFRAL antibody to GFRAL, and detecting whether a complex is formed between the anti-GFRAL antibody and GFRAL.

[0435] In one aspect, the present disclosure provides a method of diagnosing a disorder associated with expression of GFRAL. In certain embodiments, the method comprises contacting a test cell with an anti-GFRAL antibody; determining the level of expression (either quantitatively or qualitatively) of GFRAL by the test cell by detecting binding of the anti-GFRAL antibody to GFRAL; and comparing the level of expression of GFRAL by the test cell with the level of expression of GFRAL by a control cell (e.g., a normal cell of the same tissue origin as the test cell or a cell that expresses GFRAL at levels comparable to such a normal cell), wherein a higher level of expression of GFRAL by the test cell as compared to the control cell indicates the presence of a disorder associated with increased expression of GFRAL. In certain embodiments, the test cell is obtained from an individual suspected of having a disease, disorder or condition associated with expression of GDF15 and/or a disease, disorder or condition in which it is desirable to inhibit the in vivo effects of GDF15. In certain embodiments, the disease, disorder or condition is, for example, involuntary weight loss. Such exemplary diseases, disorders or conditions may be diagnosed using an anti-GFRAL antibody of the present disclosure.

[0436] In certain embodiments, a method of diagnosis or detection, such as those described above, comprises detecting binding of an anti-GFRAL antibody to GFRAL expressed on the surface of a cell or in a membrane preparation obtained from a cell expressing GFRAL on its surface. In certain embodiments, the method comprises contacting a cell with an anti-GFRAL antibody under conditions permissive for binding of the anti-GFRAL antibody to GFRAL, and detecting whether a complex is formed between the anti-GFRAL antibody and GFRAL on the cell surface. An exemplary assay for detecting binding of an anti-GFRAL antibody to GFRAL expressed GFRAL on the surface of a cell is a “FACS” assay.

[0437] Certain other methods can be used to detect binding of anti-GFRAL antibodies to GFRAL. Such methods include, but are not limited to, antigen-binding assays that are well known in the art, such as western blots, radioimmunoassays, ELISA (enzyme linked immunosorbent assay), “sandwich” immunoassays, immunoprecipitation assays, fluorescent immunoassays, protein A immunoassays, and immunohistochemistry (IHC).

[0438] In certain embodiments, anti-GFRAL antibodies are labeled. Labels include, but are not limited to, labels or moieties that are detected directly (such as fluorescent, chromophoric, electron-dense, chemiluminescent, and radioactive labels), as well as moieties, such as enzymes or ligands, that are detected indirectly, for example, through an enzymatic reaction or molecular interaction. Exemplary labels include, but are not limited to, the radioisotopes ³²P, ¹⁴C, ¹²⁵I, ³H, and ¹³¹I, fluorophores such as rare earth chelates or fluorescein and its derivatives, rhodamine and its derivatives, dansyl, umbelliferone, luceriferases, for example, firefly luciferase and bacterial luciferase (see, e.g., U.S. Pat. No. 4,737,456), luciferin, 2,3-dihydrophthalazinediones, horseradish peroxidase (HRP), alkaline phosphatase, β-galactosidase, glucoamylase, lysozyme, saccharide oxidases, e.g., glucose oxidase, galactose oxidase, and glucose-6-phosphate dehydrogenase, heterocyclic oxidases such as uricase and xanthine oxidase, coupled with an enzyme that employs hydrogen peroxide to oxidize a dye precursor such as HRP, lactoperoxidase, or microperoxidase, biotin/avidin, spin labels, bacteriophage labels, stable free radicals, and the like.

[0439] In certain embodiments, anti-GFRAL antibodies are immobilized on an insoluble matrix. Immobilization entails separating the anti-GFRAL antibody from any GFRAL that remains free in solution. This conventionally is accomplished by either insolubilizing the anti-GFRAL antibody before the assay procedure, as by adsorption to a water-insoluble matrix or surface (see, e.g., Bennich et al., U.S. Pat. No. 3,720,760), or by covalent coupling (for example, using glutaraldehyde cross-linking), or by insolubilizing the anti-GFRAL antibody after formation of a complex between the anti-GFRAL antibody and GFRAL, for example, by immunoprecipitation.

[0440] Any of the above embodiments of diagnosis or detection may be carried out using an immunoconjugate of the present disclosure in place of or in addition to an anti-GFRAL antibody.

### Assays

[0441] Anti-GFRAL antibodies of the present disclosure may be characterized for their physical/chemical properties and/or biological activities by various assays known in the art.

### 1. Activity Assays

[0442] In one aspect, assays are provided for identifying anti-GFRAL antibodies thereof having biological activity. Biological activity can include, for example, assays which measure effects on glucose and/or lipid metabolism. For example, a blood glucose assay can be used. Blood glucose (e.g., in mouse tail snip or in a human blood sample) can be measured using ACCU-CHEK Active test strips read by ACCU-CHEK Active meter (Roche Diagnostics, Indianapolis, IN) following manufacturer's instruction. In addition, for example, a lipid profile assay can be used. Whole blood (e.g., from mouse tail snips or from a human blood sample) can be collected into plain capillary tubes (BD Clay Adams SurePrep, Becton Dickenson and Co. Sparks, MD). Serum and blood cells can be separated by spinning the tubes in an Autocrit Ultra 3 (Becton Dickinson and Co. Sparks, MD). Serum samples can be assayed for lipid profile (triglyceride, total cholesterol, HDL, and non-HDL) using Integra 400 Clinical Analyzer (Roche Diagnostics, Indianapolis, IN) following the manufacturer's instructions.

### 2. Binding Assays and Other Assays

[0443] In one aspect, an anti-GFRAL antibody is tested for its antigen binding activity. For example, in certain embodiments, an anti-GFRAL antibody is tested for its ability to bind to exogenous or endogenous GFRAL expressed on the surface of a cell. A FACS assay may be used for such testing.

[0444] A panel of monoclonal antibodies raised against GFRAL may be grouped based upon the epitopes they recognize, a process known as epitope binning. Epitope binning is typically carried out using competition assays, which evaluate an antibody's ability to bind to an antigen in the presence of another antibody. In an exemplary competition assay, immobilized GFRAL is incubated in a solution comprising a first labeled antibody that binds to GFRAL and a second unlabeled antibody that is being tested for its ability to compete with the first antibody for binding to GFRAL. The second antibody may be present in a hybridoma supernatant. As a control, immobilized GFRAL is incubated in a solution comprising the first labeled antibody but not the second unlabeled antibody. After incubation under conditions permissive for binding of the first antibody to GFRAL, excess unbound antibody is removed, and the amount of label associated with immobilized GFRAL is measured. If the amount of label associated with immobilized GFRAL is substantially reduced in the test sample relative to the control sample, then that indicates that the second antibody is competing with the first antibody for binding to GFRAL. In certain embodiments, immobilized GFRAL is present on the surface of a cell or in a membrane preparation obtained from a cell expressing GFRAL on its surface.

[0445] High-throughput methods of epitope binning are also known in the art (see, e.g., Jia et al., J. Immunol. Methods 2004, 288 (1-2): 91-98, describing a method of multiplexed competitive antibody binning for the characterization of monoclonal antibodies; and Miller et al., J. Immunol. Methods 2011, 365 (1-2): 118-25, describing epitope binning of murine monoclonal antibodies by a multiplexed pairing assay).

### 3. Epitope Mapping

[0446] Epitope mapping is the process of identifying the binding sites, or epitopes, of an antibody on its target protein antigen (e.g., epitopes of an anti-GFRAL antibody on GFRAL). Antibody epitopes may be linear epitopes or conformational epitopes. Linear epitopes are formed by a continuous sequence of amino acids in a protein. Conformational epitopes are formed of amino acids that are discontinuous in the protein sequence, but which are brought together upon folding of the protein into its three-dimensional structure.

[0447] A variety of methods are known in the art for mapping antibody epitopes on target protein antigens. These include mutagenesis methods, peptide scanning methods, display methods, methods involving and mass spectroscopy, and structural determination.

[0448] The site directed mutagenesis method involves targeted site-directed mutagenesis where critical amino acids are identified by systematically introducing substitutions along the protein sequence and then determining the effects of each substitution on antibody binding. This may be done by “alanine scanning mutagenesis,” as described, for example, by Cunningham and Wells (1989) Science 244:1081-1085, or some other form of point mutagenesis of amino acid residues in human GFRAL. Mutagenesis studies, however, may also reveal amino acid residues that are crucial to the overall three-dimensional structure of GFRAL but that are not directly involved in antibody-antigen contacts, and thus other methods may be necessary to confirm a functional epitope determined using this method.

[0449] Shotgun mutagenesis mapping utilizes a comprehensive plasmid-mutation library for the target gene, with each clone in the library bearing a unique amino acid mutation and the entire library covering every amino acid in the target protein. The clones that constitute the mutation library are individually arranged in microplates, expressed within living mammalian cells, and tested for immunoreactivity with antibodies of interest. Amino acids critical for antibody epitopes are identified by a loss of reactivity and are then mapped onto a protein structure to visualize epitopes. By automating the analysis, new epitope maps can be derived within days to weeks. Because it uses the native structure of proteins within mammalian cells, the technique allows both linear and conformational epitope structures to be mapped on complex proteins. (See, e.g., Paes et al., J. Am. Chem. Soc. 131 (20): 6952-6954 (2009); Banik and Doranz, Genetic Engineering and Biotechnology News 3 (2): 25-28 (2010)).

[0450] The epitope bound by an anti-GFRAL antibody may also be determined using peptide scanning methods. In peptide scanning, libraries of short peptide sequences from overlapping segments of the target protein, GFRAL, are tested for their ability to bind antibodies of interest. The peptides are synthesized and screened for binding, e.g., using ELISA or BIACORE, or on a chip, by any of the multiple methods for solid-phase screening (see, e.g., Reineke et al., Curr. Opin. Biotechnol. 12:59-64, 2001) as in the “pepscan” methodology (see, e.g., WO 84/03564; WO 93/09872). Such peptide screening methods may not be capable of detecting some discontinuous functional epitopes, i.e. functional epitopes that involve amino acid residues that are not contiguous along the primary sequence of the GFRAL polypeptide chain.

[0451] A recently developed technology termed CLIPS (chemical linkage of peptides onto scaffolds) may be used to map conformational epitopes. The loose ends of the peptides are affixed onto synthetic scaffolds, so that the scaffolded peptide may be able to adopt the same spatial structure as the corresponding sequence in the intact protein. CLIPS technology is used to fix linear peptides into cyclic structures (‘single-loop’ format), and to bring together different parts of a protein binding site (‘double-loop’, ‘triple-loop’, etc. format), so as to create conformational epitopes that may be assayed for antibody binding (see, e.g., U.S. Pat. No. 7,972,993).

[0452] The epitopes bound by anti-GFRAL antibodies of the present disclosure may also be mapped using display techniques, including, for example, phage display, microbial display, and ribosome/mRNA display as described above. In these methods, libraries of peptide fragments are displayed on the surface of the phage or cell. Epitopes are then mapped by screening antibodies against these fragments using selective binding assays. A number of computational tools have been developed which allow the prediction of conformational epitopes based upon linear affinity-selected peptides obtained using phage display (see, e.g., Mayrose et al., Bioinformatics 23:3244-3246, 2007). Methods are also available for the detection of conformational epitopes by phage display. Microbial display systems may also be used to express properly folded antigenic fragments on the cell surface for identification of conformational epitopes (see, e.g., Cochran et al., J. Immunol. Meth. 287:147-158, 2004; Rockberg et al., Nature Methods 5:1039-1045, 2008).

[0453] Methods involving proteolysis and mass spectroscopy may also be used to determine antibody epitopes (see, e.g., Baerga-Ortiz et al., Protein Sci. 2002 June; 11 (6): 1300-1308). In limited proteolysis, the antigen is cleaved by different proteases, in the presence and in the absence of the antibody, and the fragments are identified by mass spectrometry. The epitope is the region of the antigen that becomes protected from proteolysis upon binding of the antibody (see, e.g., Suckau et al., Proc. Natl. Acad. Sci. USA 87:9848-9852, 1990). Additional proteolysis based methods include, for example, selective chemical modification (see, e.g., Fiedler et al., Bioconjugate Chemistry 1998, 9 (2): 236-234, 1998), epitope excision (see, e.g., Van de Water et al., Clin. Immunol. Immunopathol. 1997, 85 (3): 229-235, 1997), and the recently developed method of hydrogen-deuterium (H/D) exchange (see, e.g., Flanagan, N., Genetic Engineering and Biotechnology News 3 (2): 25-28, 2010).

[0454] The epitope bound by anti-GFRAL antibodies of the present disclosure may also be determined by structural methods, such as X-ray crystal structure determination (see, e.g., WO 2005/044853), molecular modeling and nuclear magnetic resonance (NMR) spectroscopy, including NMR determination of the H-D exchange rates of labile amide hydrogens when free and when bound in a complex with an antibody of interest (see, e.g., Zinn-Justin et al. (1992) Biochemistry 31:11335-11347; Zinn-Justin et al. (1993) Biochemistry 32:6884-6891).

[0455] Additional antibodies binding to the same epitope as an anti-GFRAL antibody of the present disclosure may be obtained, for example, by screening of antibodies raised against GFRAL o for binding to the epitope, by immunization of an animal with a peptide comprising a fragment of human GFRAL comprising the epitope sequence, or by selection of antibodies using phage display for binding to the epitope sequence. Antibodies that bind to the same functional epitope might be expected to exhibit similar biological activities, such as blocking a biological activity of GFRAL, and such activities can be confirmed by functional assays of the antibodies.

### 4. Additional Activity Assays

[0456] In one embodiment, an anti-GFRAL antibody of the present disclosure is an antagonist antibody that inhibits a biological activity of GFRAL. The anti-GFRAL antibodies of the present disclosure may be assayed to determine if they inhibit a biological activity of GFRAL.

[0457] In one aspect, purified anti-GFRAL antibodies can be further characterized by a series of assays including, but not limited to, N-terminal sequencing, amino acid analysis, non-denaturing size exclusion high pressure liquid chromatography (HPLC), mass spectrometry, ion exchange chromatography and papain digestion.

[0458] In one embodiment, the present disclosure contemplates an altered antibody that possesses some but not all effector functions, which make it a desirable candidate for many applications in which the half life of the antibody in vivo is important yet certain effector functions (such as complement and ADCC) are unnecessary or deleterious. In certain embodiments, the Fc activities of the antibody are measured to ensure that only the desired properties are maintained. In vitro and/or in vivo cytotoxicity assays can be conducted to confirm the reduction/depletion of CDC and/or ADCC activities. For example, Fc receptor (FcR) binding assays can be conducted to ensure that the antibody lacks FcγR binding (hence likely lacking ADCC activity), but retains FcRn binding ability. An in vitro assay to assess ADCC activity of a molecule of interest is described, for example, in U.S. Pat. No. 5,500,362 or 5,821,337. Useful effector cells for such assays include peripheral blood mononuclear cells (PBMC) and Natural Killer (NK) cells. Alternatively, or additionally, ADCC activity of the molecule of interest may be assessed in vivo, for example, in a animal model such as that disclosed in Clynes et al. PNAS (USA) 95:652-656 (1998). C1q binding assays may also be carried out to confirm that the antibody is unable to bind C1q and hence lacks CDC activity. To assess complement activation, a CDC assay, for example, as described in Gazzano-Santoro et al., J. Immunol. Methods 202:163 (1996), may be performed. FcRn binding and in vivo clearance/half life determinations can also be performed using methods known in the art.

[0459] Although the foregoing present disclosure has been described in some detail by way of illustration and example for purposes of clarity of understanding, the descriptions and examples should not be construed as limiting the scope of the present disclosure. The disclosures of all patent and scientific literatures cited herein are expressly incorporated in their entirety by reference.

### EXAMPLES

[0460] The following are examples of methods and compositions of the present disclosure.

### Example 1: Generation of Antibodies

[0461] Antibodies to a GFRALprotein were generated, for example, by immunizations of mice with cells expressing a GFRAL protein, co-expressing a RET protein and a GFRAL protein, or cross-linking of a GDF15 protein onto cells co-expressing a RETprotein and a GFRAL protein. Mice were also immunized with a GFRAL ECD, GDF15:GFRAL ECD complex and/or GFRAL ECD Fc fusion: RET ECD Fc fusion.

[0462] For example, the cells used for immunizations were prepared as follows. 293EXPI (Invitrogen) cells were transiently transfected with nucleic acid sequences encoding a GFRAL protein (SEQ ID NO: 1797) or co-transfected with nucleic acid sequences encoding a GFRAL protein and a RET protein (SEQ ID NOS: 1797 and 1813). Cells were analyzed for expression of GFRAL and RET by the respective specific antibodies by FACS. Cells were washed 2 times in PBS, pelleted by centrifugation and membrane preps were generated. 129/B6 or NZBW animals were immunized with membrane preps with adjuvants. Animals were boosted to induce a suitable titer. Titers were determined by ELISA and/or FACS. Single cell suspensions of lymphocytes were obtained from spleen and draining lymph nodes of animals with suitable titers. Cells were fused with SP2/0 myeloma cells at a ratio of 1:12 by electrofusion. Fused cells were plated into plates in the presence of HAT selection. After 10-14 days of culture, supernatants were collected and subjected to screening by cell imaging by CellnSight using GFRAL or GFRAL and RET overexpressing-293EXPI cells or by ELISA using GFRAL-Fc protein or RET and GFRAL Fc-heterodimers to confirm binding. Positive clones were further selected and subjected to subcloning.

[0463] In multiple campaigns of immunizations and fusions, over one-hundred thousand hybridoma clones were screened and more than two thousand clones were selected for GDF15-binding, cell-based GDF15-induced signaling and cell-based GDF15-independent signaling. Hundreds of clones (e.g., 250) were selected for additional study, including assays for binding affinity, domain mapping, and epitope specificity. Thousands of hybridoma supernatants were also tested in functional assays, including antagonistic and agonist activity assays. Hundreds of clones were purified for further testing.

### Example 2: Screening and Selection of Antibodies

[0464] After 2 weeks of culture, hybridoma supernatants were screened for monoclonal antibodies binding to a GFRAL protein by cell imaging by CellnSight using GFRAL or GFRAL and RET overexpressing-293EXPI cells or by ELISA using GFRAL-Fc protein or RET and GFRAL Fc-heterodimers. Briefly, screening by cell imaging, 293EXPI cells were transiently transfected with nucleic acid sequences encoding GFRAL or co-transfected with nucleic acid sequences encoding GFRAL and RET. Transfected cells were plated onto 384-well plates with clear bottom. Media was replaced 24 hours post transfection. At 48 hrs, media was aspirated off the plates, hybridoma supernatants were added to the wells and incubated at room temperature for 30 mins. Then A647 anti-mouse Fc were added to the wells and incubated at room temperature for another 30 mins. Dapi positive cells were analyzed for a signal in the A647 channel and a positive A647 signal indicates GFRAL binders.

[0465] Briefly, screening by ELISA, GFRAL-Fc protein or RET and GFRAL Fc-heterodimers was captured by anti-human Fc reagents coated onto ELISA plates. Plates were blocked using PBS/1% BSA. 15 μL of hybridoma supernatants were added to the wells and incubated at room temperature for 1 hr. After 3 washes, 15 μL of HRP-anti-mouse Fc secondary were added to the wells and incubated at room temperature for 1 hr. After 3 washes, 15 μL of TMB were used to develop the plates. A positive signal indicates GFRAL binders.

[0466] From these assays, thousands of antibodies were identified as binders to GFRAL. These antibodies were subjected to further testing, which included assaying for binding affinity, domain mapping, epitope specificity, and agonistic and antagonistic function. Hundreds of antibodies were purified for further testing.

[0467] In addition, the binding affinity of antibodies to human and mouse GFRAL were measured. For example, antibodies were rank ordered based on their binding affinity to human GFRAL and mouse GFRAL by low resolution K_{D} measurement by Biacore. Briefly, an anti-mouse Fc antibody (Sigma-Aldrich, St. Louis, MO) was immobilized on all four flow cells of a CM5 chip using amine coupling reagents (GE Healthcare LifeSciences, Piscataway, NJ). Purified antibodies were captured (˜100 RUs) on flow cells 2, 3 and 4 using flow cell 1 as a reference. This was followed by injection of human or mouse GFRAL (25 nM in PBS-P buffer) at a flow rate of 70 μL/min and monitoring the binding kinetics at 25° C.

[0468] Binding affinity measurements were also made in additional Biacore based assays. For example, equilibrium dissociation constant (K_{D}) measurements were carried out with purified antibodies to evaluate their binding to human GFRAL or mouse GFRAL. As mentioned above, anti-mouse Fc antibody (Sigma-Aldrich, St. Louis, MO) was immobilized on all four flow cells of a CM5 chip using amine coupling reagents (GE Healthcare LifeSciences, Piscataway, NJ). Purified antibodies were captured (˜100 RUs) on flow cells 2, 3 and 4 using flow cell 1 as a reference. This was followed by injection of human or mouse GFRAL in PBS-P buffer) at a flow rate of 70 μL/min and the binding kinetics were evaluated at 25° C.

[0469] Representative results for binding affinity (e.g., K_{D} (nM)) to human and mouse GFRAL are shown in Table 26 below. In addition, representative results for off-rate of binding (e.g., K_{off} (1/s)) are shown in Table 26 below for exemplary antibodies.

TABLE 26

| Binding Affinity | |
|---|---|
| Human GFRAL | Mouse GFRAL |

| Clone ID | K_{D} (nM) | K_{off} (1/s) | K_{D} (nM) | K_{off} (1/s) |
|---|---|---|---|---|
| 1C1 | <0.1 | ~1E5 | 3.68 | 2.5E−3 |
| 25M22 | <0.1 | ~1E−5 | 4.2 | 1E−4 |
| 8D8 | 0.46 | 1.24E−4 | 8.17 | 2.81E−3 |
| 12A3 | <0.1 | ~1E−5 | 5.7 | 2.16E−3 |
| 3P10 | <0.1 | ~1E−5 | <0.1 | ~1E−5 |
| 5F12 | <0.1 | ~1E−5 | 2.2 | 9E−4 |
| 5A20 | 0.081 | 3.32E−5 | <0.1 | 4−E4 |
| 17J16 | <0.1 | ~1E−5 | <0.1 | 1E−5 |
| 6G9 | <0.1 | ~1E5 | No | N/A |
| 2B8 | 0.73 | ~1E5 | 3.76 | 1.3E−2 |
| 6N16 | 0.16 | 9.93E−5 | ND | NA |
| 8C10 | <0.1 | 7.2E−5 | weak | 49.26 |
| 2B11 | 0.1 | 8.45E−5 | 3.7 | 1.44E−3 |
| 1B3 | <0.1 | 9.4E−9 | 4.4 | 1.07E−3 |
| 19K19 | 0.21 | 1.35E−4 | 4.7 | 3.4E−3 |
| 22N5 | 0.21 | 1.32E−4 | 3.47 | 9.43E−4 |
| 2A9 | 0.25 | 1.53E−4 | 3.6 | 2.9E−3 |
| 24G2 | 1.4 | 6.96E−4 | 5.02 | 1.73E−3 |
| 2I23 | 0.23 | 6.77E−5 | ND | NA |
| 1A3 | 0.11 | 7.57E−5 | ND | NA |
| P1B6 | 0.14 | 9.72E−5 | ND | NA |
| P1H8 | 0.21 | 8.99E−5 | ND | NA |
| P8G4 | 0.21 | 2.76E−4 | ND | NA |

NA = does not apply;
ND = no binding detected

[0470] For exemplary antibodies 1C1 and 3P10, affinity is driven mainly by a very slow off-rate (see, e.g., FIG. 3). Antibodies that bind to GFRAL as shown in Table 26 above do not recognize (e.g., bind to) GNFR alpha 1, the most closely related homolog of GFRAL.

### Example 3: Functional Assays

[0471] Antibodies to GFRAL generated, for example, such as described in Example 1, were tested for their functional activity in cell-based reporter assays.

[0472] For example, ELK1-luciferase reporter assays, which measure human GDF15 (hGDF15)-induced human GFRAL/RET signaling, were performed using transiently transfected HEK293T. The transfecting plasmids consisted of two reporter plasmids, Gal4-Elk1 and 5×UAS-Luc (Agilent Technologies PathDetect Elk1 trans-reporting system Cat #219005), and plasmids encoding human GFRAL (hGFRAL), cynomolgus monkey GFRAL (cynoGFRAL), mouse GFRAL (mGFRAL), or rat GFRAL (rGFRAL), and human RET (hRET), cynomolgus monkey RET (cynoRET), mouse RET (mRET) or rat RET (rRET). In these assays, hGDF15-induced activation of recombinantly expressed GFRAL/RET receptor complex in the cells triggers intracellular signaling transduction, which leads to ERK and then Elk1 phosphorylation. Once Gal4-Elk1 is phosphorylated, Gal4-Elk1 binds to the 5×UAS promoter region and turns on luciferase reporter gene transcription. The activity of luciferase is then measured in luciferase enzymatic assays.

[0473] Representative results for antibodies to GFRAL inhibiting human GFRAL/RET signaling are shown in Table 27 below.

TABLE 27

IC₅₀ (nM)

| Clone ID | hGFRAL/hRET | mGFRAL/mRET |
|---|---|---|
| 5F12 | 0.834 | 6.276 |
| 3P10 | 4.088 | 1.029 |
| 17J16 | 0.6658 | 0.4075 |
| 6G9 | 2.65 | ND |
| 2B8 | 1.923 | 2.449 |
| 6N16 | 1.618 | ND |
| 8C10 | 1.786 | WB |
| 2B11 | 7.896 | ND |
| 25M22 | 2.887 | 1.113 |
| 12A3 | 4.993 | 0.9334 |
| 1B3 | 4.136 | ND |
| 19K19 | 3.877 | 0.8948 |
| 1C1 | 8.638 | 1.189 |
| 8D8 | 2.106 | 1.419 |
| 22N5 | 7.744 | 2.599 |
| 2A9 | 3.706 | 7.871 |
| 2B3 | 7.124 | 7.761 |
| 24G2 | 18.94 | 8.324 |
| 5A20 | 3.19 | 0.6 |
| 2I23 | 7.185 | NP |
| 1A3 | ND | NP |
| P1B6 | ND | NP |
| P1H8 | ND | NP |
| P8G4 | ND | NP |

ND = blocking not detected in assay
NP = assay not performed
WB = weak blocking detected in assay

[0474] For some experiments, the above mentioned four plasmids (e.g., 2 reporter plasmids, GFRAL, RET) were transfected into newly harvested cells in suspension using FuGene6 transfection reagent (Promega). The GFRAL and RET DNA ratio in transfection was optimized for the each pair of receptors from indicated species and varied between 12:1 to 60:1. Transfected cells were seeded into 384-well plate (7500 cells/25 μL/well) in normal growth medium. After overnight incubation at 37° C., a mix of serially diluted antibodies and fixed concentration of hGDF15 were added. After 6 hrs at 37° C. incubation with the antibodies, an equal volume of Bright-Glo reagent (Promega) was added and luminescence signal was read using Enspire reader (Perkin Elmer).

[0475] Simultaneous addition of antibodies, antagonizing the hGDF15 effect, blocked hGDF15 signaling in a dose-dependent manner preventing expression of luciferase reporter gene.

### Example 4: Additional Functional Assays

[0476] Anti-hGFRAL antibodies were tested for their hGDF15 antagonising activity in an additional cell-based assay, such as an U2OS assay stably expressing hGFRAL and hRET. One day before the assay, the cells were plated in 90 μl of DiscoveRx Assay Complete Cell Plating 16 Reagent (DiscoveRx, Cat #93-0563R16B) at 20K/each of 96 well plate. Next day the cells were treated with a mix of serially diluted antibodies and a fixed concentration of hGDF15 for 10 minutes at 37° C. Cis-bio Cellul'erk assay kit (Cat #64ERKPEH) was used to assay for ERK phosphorylation level following the manufacturer's protocol. Similar to the Hek293T Elk1 reporter assay, hGDF15 antagonising antibodies were able to prevent hGDF15-induced phosphorylation in a dose-dependent manner.

[0477] Representative results for antibodies to GFRAL preventing hGDF15-induced phosphorylation are shown in Table 28 below.

TABLE 28

| Clone ID | IC₅₀ (nM) |
|---|---|
| 5F12 | 0.06 |
| 3P10 | 0.08 |
| 17J16 | 0.10 |
| 6G9 | 0.17 |
| 2B8 | 0.22 |
| 6N16 | 0.27 |
| 8C10 | 0.28 |
| 2B11 | 0.46 |
| 25M22 | 0.53 |
| 12A3 | 0.54 |
| 1B3 | 0.57 |
| 19K19 | 0.61 |
| 1C1 | 0.61 |
| 8D8 | 0.63 |
| 22N5 | 0.90 |
| 2A9 | 0.94 |
| 2B3 | 1.48 |
| 24G2 | 1.86 |
| 5A20 | 1.80 |
| 2I23 | NP |
| 1A3 | NP |
| P1B6 | NP |
| P1H8 | NP |
| P8G4 | NP |

NP = assay not performed

### Example 5: Ligand Competition, Domain Mapping and Epitope Binning

[0478] Antibodies that were selected for binding to GFRAL were evaluated in ligand competition binding assays, domain and epitope binning experiments.

[0479] Briefly, ligand competition binding assays were performed by capturing GFRAL-Fc protein or RET and GFRAL Fc-heterodimers onto ELISA plates by anti-human Fc. Plates were blocked using PBS/1% BSA. 15 UL of a dose titration of antibodies were added to the wells starting at 10 μg/mL with a 3× dilution and incubated at room temperature for 30 min. Without washing, biotinyated GDF15 (GFRAL ligand) was added to the wells for an additional 1 hr. After 3 washes, 15 μL of HRP-streptavidin secondary were added to the wells and incubated at room temperature for 1 hr. After 3 washes, 15 μL of TMB were used to develop the plate. A positive signal indicates that biotinylated GDF15 still binds to GFRAL captured on the plate and the antibody is not a ligand competitor. A negative signal indicates that biotinylated GDF15 no longer binds to GFRAL captured on the plate and the antibody is a ligand competitor.

[0480] Briefly, domain mapping assays were performed by transiently transfecting 293EXPI cells with nucleic acid sequences encoding GFRAL (SEQ, GFRAL domain 1, GFRAL domain 2, GFRAL domain 1+2, GFRAL domain 1+3, GFRAL domain 2+3, or GFRAL domain 3.

[0481] Seven GFRAL deletion constructs (Constructs 1 to 7) were tested, which included the following features contiguously from N-terminus to C-terminus: IgK signal sequence (depicted by lower case and underlined letters in the below sequences), FLAG tag sequence (depicted by lower case and italicized letters in the below sequences) and GFRAL protein sequences with various extracellular domain combinations (domain 1 depicted in bold capital letters; domain 2 depicted in underlined capital letters; domain 3 depicted in bold and underlined letters). Construct 1 (IgK-2Flag-GFRAL; SEQ ID NO: 1817) contained human GDF15 polypeptide (residues Q20 to L394), in which domains 1, 2 and 3 were present. Construct 2 (IgK-2Flag-GFRAL domain 1; SEQ ID NO: 1818) contained GFRAL-ΔD2,ΔD3 (residues Q20 to S130 and F317 to L394), in which domains 2 and 3 were deleted. Construct 3 (IgK-2Flag-GFRAL domain 2; SEQ ID NO: 1819) contained GFRAL-ΔD1,ΔD3 (residues S121 to C210 and F317 to L394), in which domains 1 and 3 are deleted. Construct 4 (IgK-2Flag-GFRAL domain 1+2; SEQ ID NO: 1820) contained GFRAL-ΔD3 (residues Q20 to C210 and F317 to L394), in which domain 3 was deleted. Construct 5 (IgK-2Flag-GFRAL domain 1+3; SEQ ID NO: 1821) contained GFRAL-ΔD2 (residues Q20 to S130 and C220 to L394), in which domain 2 was deleted. Construct 6 (IgK-2Flag-GFRAL domain 2+3; SEQ ID NO: 1822) contained GFRAL-ΔD1 (residues S121 to L394), in which domain 1 was deleted. Construct 7 (IgK-2Flag-GFRAL domain 3; SEQ ID NO: 1823) contained GFRAL-ΔD1,ΔD2 (residues A211 to L394), in which domains 2 and 3 were deleted.

Construct 1
(IgK-2Flag-GFRAL; SEQ ID NO: 1817)
mdmrvpaglIgllllwlrgarcdykddddksaggdykddddkggQ
TNNCTYLREQCLRDANGCKHAWRVMEDACNDSDPGDPCKMRNSSY
CNLSIQYLVESNFQFKECLCTDDFYCTVNKLLGKKCINKSDNVKE
DKFKWNLTTRSHHGFKGMWSCLEVAEACVGDVVCNAQLASYLKAC
SANGNPCDLKQCQAAIRFFYQNIPFNIAQMLAFCDCAQSDIPCQQ
SKEALHSKTCAVNMVPPPTCLSVIRSCQNDELCRRHYRTFQSKCW
QRVTRKCHEDENCISTLSKQDLTCSGSDDCKAAYIDILGTVLQVQ
CTCRTITQSEESLCKIFQHMLHRKSCFNYPTLSNVKGMALYTRKH
ANKITLTGFHSPFNGEVIYAAMCMTVTCGILLLVMVKLRTSRISS
KARDPSSIQIPGEL
Construct 2
(IgK-2Flag-GFRAL domain 1; SEQ ID NO: 1818)
mdmrvpaglIgllllwlrgarcdykddddksaggdykddddkggQ
TNNCTYLREQCLRDANGCKHAWRVMEDACNDSDPGDPCKMRNSSY
CNLSIQYLVESNFQFKECLCTDDFYCTVNKLLGKKCINKSDNVKE
DKFKWNLTTRSHHGFKGMWSFNYPTLSNVKGMALYTRKHANKITL
TGFHSPFNGEVIYAAMCMTVTCGILLLVMVKLRTSRISSKARDPS
SIQIPGEL
Construct 3
(IgK-2Flag-GFRAL domain 2; SEQ ID NO: 1819)
mdmrvpaglIgllllwlrgarcdykddddksaggdykddddkggS
HHGFKGMWSCLEVAEACVGDVVCNAQLASYLKACSANGNPCDLKQ
CQAAIRFFYQNIPFNIAQMLAFCDCAQSDIPCQQSKEALHSKTCF
NYPTLSNVKGMALYTRKHANKITLTGFHSPFNGEVIYAAMCMTVT
CGILLLVMVKLRTSRISSKARDPSSIQIPGEL
Construct 4
(IgK-2Flag-GFRAL domain 1+2; SEQ ID NO: 1820)
mdmrvpaglIgllllwlrgarcdykddddksaggdykddddkggQ
TNNCTYLREQCLRDANGCKHAWRVMEDACNDSDPGDPCKMRNSSY
CNLSIQYLVESNFQFKECLCTDDFYCTVNKLLGKKCINKSDNVKE
DKFKWNLTTRSHHGFKGMWSCLEVAEACVGDVVCNAQLASYLKAC
SANGNPCDLKQCQAAIRFFYQNIPFNIAQMLAFCDCAQSDIPCQQ
SKEALHSKTCFNYPTLSNVKGMALYTRKHANKITLTGFHSPFNGE
VIYAAMCMTVTCGILLLVMVKLRTSRISSKARDPSSIQIPGEL
Construct 5
(IgK-2Flag-GFRAL domain 1 + 3; SEQ ID NO: 1821)
mdmrvpaglIgllllwlrgarcdykddddksaggdykddddkggQ
TNNCTYLREQCLRDANGCKHAWRVMEDACNDSDPGDPCKMRNSSY
CNLSIQYLVESNFQFKECLCTDDFYCTVNKLLGKKCINKSDNVKE
DKFKWNLTTRSHHGFKGMWSCLSVIRSCQNDELCRRHYRTFQSKC
WQRVTRKCHEDENCISTLSKQDLTCSGSDDCKAAYIDILGTVLQV
QCTCRTITQSEESLCKIFQHMLHRKSCFNYPTLSNVKGMALYTRK
HANKITLTGFHSPFNGEVIYAAMCMTVTCGILLLVMVKLRTSRIS
SKARDPSSIQIPGEL
Construct 6
(IgK-2Flag-GFRAL domain 2 + 3; SEQ ID NO: 1822)
mdmrvpaglIgllllwlrgarcdykddddksaggdykddddkggS
HHGFKGMWSCLEVAEACVGDVVCNAQLASYLKACSANGNPCDLKQ
CQAAIRFFYQNIPFNIAQMLAFCDCAQSDIPCQQSKEALHSKTCA
VNMVPPPTCLSVIRSCQNDELCRRHYRTFQSKCWQRVTRKCHEDE
NCISTLSKQDLTCSGSDDCKAAYIDILGTVLQVQCTCRTITQSEE
SLCKIFQHMLHRKSCFNYPTLSNVKGMALYTRKHANKITLTGFHS
PFNGEVIYAAMCMTVTCGILLLVMVKLRTSRISSKARDPSSIQIP
GEL
Construct 7
(IgK-2Flag-GFRAL domain 3; SEQ ID NO: 1823)
mdmrvpaglIgllllwlrgarcdykddddksaggdykddddkggA
VNMVPPPTCLSVIRSCQNDELCRRHYRTFQSKCWQRVTRKCHEDE
NCISTLSKQDLTCSGSDDCKAAYIDILGTVLQVQCTCRTITQSEE
SLCKIFQHMLHRKSCFNYPTLSNVKGMALYTRKHANKITLTGFHS
PENGEVIYAAMCMTVTCGILLLVMVKLRTSRISSKARDPSSIQIP
GEL

[0482] Cells were incubated with 1 μg/mL of antibodies for 30 mins at 4° C. After washing, cells were incubated with a fluorochrome labeled anti-mouse Fc secondary antibody either A488 or A647 for 30 mins at 4° C. After washing, cells were analyzed by FACs. A positive signal indicates that the antibody binds to the domain overexpressed by the transfected 293EXPI cells. A negative signal indicates that the antibody does not bind to the domain overexpressed by the transfected 293EXPI cells.

[0483] Briefly, epitope binning assays were performed by directly coating plates with 2 μg/mL of antibodies (mAb1). Plates were blocked using PBS/1% BSA. 2 μg/mL of antibodies (mAb2) were pre-incubated with 50 ng/ml of GFRAL-Fc protein for 30 min before adding to wells at room temperature for 1 hr. After 3 washes, 15 UL of HRP-anti-human Fc secondary were added to the wells and incubated at room temperature for 1 hr. After 3 washes, 15 μL of TMB were used to develop the plate. A positive signal indicates that GFRAL-Fc protein still binds to the captured antibody (mAb1) on the plate and antibody (mAb2) is not in the same epitope bin as the captured antibody (mAb1). A negative signal indicates that GFRAL-Fc protein no longer binds to the captured antibody (mAb1) on the plate and antibody (mAb2) is in the same epitope bin as the captured antibody (mAb1).

[0484] Representative results for inhibition of GDF15 binding to GFRAL, domain mapping of GFRAL and epitope binning are shown in Table 29 below.

TABLE 29

| | | GFRAL | Epitope |
|---|---|---|---|
| Clone ID | Inhibition | Domain | Bin |
| 5F12 | No | D3 | 4 |
| 3P10 | No | D3 | 4 |
| 17J16 | Partial | D2 | 1 |
| 6G9 | No | D3 | 4 |
| 2B8 | Yes | — | 2 |
| 6N16 | No | D3 | 4 |
| 8C10 | Yes | D2 | 2 |
| 2B11 | No | D3 | 4 |
| 25M22 | Yes | D2 | 2 |
| 12A3 | Yes | D2 | 2 |
| 1B3 | No | D3 | 4 |
| 19K19 | Yes | D2 | 2 |
| 1C1 | Yes | D2 | 3 |
| 8D8 | Yes | D2 | 1 |
| 22N5 | Yes | D2 | 3 |
| 2A9 | Yes | D2 | 3 |
| 2B3 | Yes | ND | 1 |
| 24G2 | Yes | NA | 1 |
| 5A20 | Partial | D2 | 1 |
| 2I23 | No | NA | 4 |
| 1A3 | No | D1 | 5 |
| P1B6 | No | D1 | 5 |
| P1H8 | No | D1 | 7 |
| P8G4 | No | D1 | 6 |

NA = does not apply;
ND = no binding detected

[0485] As shown in Table 29 above, at least three classes of anti-GFRAL antibodies were identified, including antibodies that block GDF15 binding (e.g., competitive antagonists), antibodies that do not block GDF15 binding (e.g., non-competitive antagonists), and partial blockers of GDF15 binding. Antibodies were also identified as binding to domain 1, domain 2 or domain 3 of GFRAL. The antibodies that bound to domain 2 were found to either inhibit GDF15 binding to GFRAL or at leastly partially inhibit this binding. The antibodies that bound to domains 1 or 3 did not inhibit GDF15 binding to GFRAL.

[0486] An alignment of exemplary anti-GFRAL antibodies assayed in Examples 2-4 and described above is shown in FIGS. 4A-4B.

[0487] Alignments of VH and VL domains for antibodies that were found to bind domain 1, domain 2 or domain 3 are shown in FIGS. 5A-5F, respectively.

### Example 6: Humanization

[0488] Humanized anti-GFRAL antibodies were generated, including from antibodies selected as described in Examples 1-5. Exemplary humanized antibodies are generated comprising one or more CDRs from Tables 1-24, including, for example, the CDRs for the antibody designated 1C1 (see, e.g., Table 1), for the antibody designated 25M22 (see, e.g., Table 8), for the antibody designated 17J16 (see, e.g., Table 7), for the antibody designated 5F12 (see, e.g., Table 4), and for the antibody designated 3P10 (see, e.g., Table 2). The sequences of VH and VL regions for exemplary humanized antibodies 1C1, 25M22, 17J16, 5F12, and 3P10 are shown in FIGS. 6A-6B, 7A-7B, 8A-8B, 9A-9B, and 10A-10B.

[0489] A number of anti-GFRAL antibodies were selected for sequencing and subsequently for humanization. An NCBI immunoglobulin (Ig) sequence blastp search was conducted to identify human germline sequences with significant similarity to mouse VH and VL sequences. Examples for potential human framework sequences are given in Table 30. Considering sequence similarities, biophysical properties and potential immunogenicity, germline sequences for IGH and IGK were chosen as human framework sequences. The germline sequences that were chosen are highlighted in bold in Table 30. In order to identify the best matching framework 4 sequence, a similar approach was taken for choosing JH and JK germline sequences, and these chosen sequences are also highlighted in bold in Table 30.

TABLE 30

| | Human | Human | Human | Human |
|---|---|---|---|---|
| | germline | germline | germline | germline |
| | donor | donor | donor | donor |
| Clone | sequence | sequence | sequence | sequence |
| ID | for VH | for JH | for VL | for JK |
| 3P10 | IGHV1-18 | IGHJ6 | IGKV1-39 | IGKJ4 |
| | IGHV1-3 | IGHJ1 | IGKV3-20 | IGKJ2 |
| | IGHV1-46 | | IGKV2-30 | |
| | IGHV1-2 | | IGK4-1 | |
| | IGHV1-69 | | IGK3-11 | |
| 5F12 | IGHV1-46 | IGHJ1 | IGKV4-1 | IGKJ4 |
| | IGHV1-3 | IGHJ3 | IGKV2-30 | IGKJ2 |
| | IGHV1-69 | | IGKV1-39 | |
| | IGHV1-2 | | IGKV3-11 | |
| | | | IGKV1-5 | |
| | | | IGKV1-27 | |
| 25M22 | IGHV5-51 | IGHJ6 | IGKV2-29 | IGKJ4 |
| | IGHV1-46 | IGHJ4 | IGKV2-28 | IGKJ2 |
| | IGHV1-3 | | IGKV2-18 | |
| | IGHV1-2 | | IGKV2-30 | |
| | IGHV1-69 | | IGKV3-20 | |
| | IGHV1-18 | | IGKV1-39 | |
| 1C1 | IGHV4-39 | IGHJ4 | IGKV3-20 | IGKJ4 |
| | IGHV4-31 | IGHJ6 | IGKV1-39 | IGKJ2 |
| | IGHV3-33 | | IGKV2-30 | |
| | IGHV4-59 | | IGKV2-28 | |
| 17J16 | IGHV1-2 | IGHJ6 | IGKV2-30 | IGKJ4 |
| | IGHV1-46 | | IGKV2-29 | IGKJ2 |
| | IGHV1-3 | | IGKV2-40 | |
| | IGHV1-69 | | IGKV3-20 | |
| | | | IGKV1-39 | |
| 1A3 | IGHV5-51 | IGHJ6 | IGKV2-28 | IGKJ4 |
| | IGHV1-69 | IGHJ4 | IGKV2-30 | IGKJ2 |
| | IGHV1-46 | | IGKV4-1 | |
| | IGHV1-2 | | | |
| P1B6 | IGHV5-51 | IGHJ4 | IGKV3-11 | IGKJ4 |
| | IGHV1-69 | IGHJ1 | IGKV1-9 | IGKJ2 |
| | IGHV1-46 | | IGKV1-5 | |
| | IGHV1-2 | | IGKV3-15 | |
| | | | IGKV1-33 | |
| | | | IGKV3-20 | |
| P1H8 | IGHV5-51 | IGHJ6 | IGHV2-28 | IGKJ4 |
| | IGHV1-69 | IGHJ4 | IGHV2-30 | IGKJ2 |
| | IGHV1-46 | | IGHV4-1 | |
| | IGHV1-2 | | | |
| P8G4 | IGHV4-59 | IGHJ4 | IGKV3-11 | IGKJ1 |
| | IGHV3-23 | IGHJ6 | IGKV1-39 | IGKJ2 |
| | IGHV4-4 | | IGKV1-5 | |
| | IGHV3-30 | | IGKV3-20 | |

[0490] The CDR sequences of murine antibodies were then transferred (e.g., grafted) to the corresponding positions of human IGH and IGK and J-region residues corresponding to framework four were added. The resulting protein sequence was back translated into a DNA sequence, codon optimized for expression in mammalian cells and synthesized (GeneArt/LifeTechnologies). Subsequently, the synthesized DNA fragment was cloned using In-Fusion technology (Clontech) into pTT5 vector (NRC Biotechnology Research Institute) to create expression ready constructs that contain a Kozak sequence, the hIgK signal peptide followed by the humanized variable-region of the desired antibody plus the constant region of the antibody (hIgG1/hIgK). At the same time individual residues in the framework regions were selected to be back-mutated to mouse residues in order to retain binding affinities. Special consideration was given to Vernier Zone residues. Such variants were either created by side directed mutatgenesis (QuickChange, Agilent) or de-novo DNA synthesis. Such expression constructs were then used for transient protein expression in Expi293 cells (Thermo Fischer), secreted antibodies were purified from tissue culture supernatant and tested for binding affinities. In order to optimize for binding affinity and lowest number of necessary back mutations, a second round of construct designs were typically made followed by antibody expression, purification and measurement of binding affinities.

[0491] Exemplary humanized anti-GFRAL antibodies include an antibody comprising: a VH that is SEQ ID NO: 1982 (HC-344e) and VL that is SEQ ID NO: 1997 (LC-344h), a VH that is SEQ ID NO: 1978 (HC-344a) and VL that is SEQ ID NO: 1992 (LC-344c); a VH that is SEQ ID NO: 1978 (HC-344a) and VL that is SEQ ID NO: 1997 (LC-344h); a VH that is SEQ ID NO: 1985 (HC-344h) and VL that is SEQ ID NO: 1997 (LC-344h); a VH that is SEQ ID NO: 1961 (HC-375d) and VL that is SEQ ID NO: 1976 (LC-375j); a VH that is SEQ ID NO: 1962 (HC-375e) and VL that is SEQ ID NO: 1976 (LC-375j); a VH that is SEQ ID NO: 1964 (HC-375g) and VL that is SEQ ID NO: 1967 (LC-375a); or a VH that is SEQ ID NO: 1964 (HC-375g) and VL that is SEQ ID NO: 1976 (LC-375j).

### Example 7: Selection of Humanized Antibodies

[0492] Exemplary humanized anti-GFRAL antibodies identified in Example 6 were assayed for their binding affinity to human GFRAL. Binding affinity measurements were made in Biacore based assays. For example, equilibrium dissociation constant (K_{D}) measurements were carried out with purified antibodies to evaluate their binding to human GFRAL. Using methods described in Example II, anti-mouse Fc antibody (Sigma-Aldrich, St. Louis, MO) was immobilized on all four flow cells of a CM5 chip using amine coupling reagents (GE Healthcare LifeSciences, Piscataway, NJ). Purified humanized anti-GFRAL antibodies were captured (˜100 RUs) on flow cells 2, 3 and 4 using flow cell 1 as a reference. This was followed by injection of human GFRAL in PBS-P buffer) at a flow rate of 70 μL/min and the binding kinetics were evaluated at 25° C.

[0493] Representative results for binding affinity (e.g., K_{D} (nM)) of exemplary humanized anti-GFRAL antibodies (e.g., humanized 3P10 and humanized 5F12) to human GFRAL are shown in Tables 31 and 32 below.

TABLE 31

| | Binding Affinity |
|---|---|
| Humanized anti-GFRAL | to Human GFRAL |
| Antibodies | K_{D} (pM) |
| 3P10 Hybridoma | <10 |
| HC-344a/LC-344c | 12 |
| HC-344a/LC-344h | <10 |
| HC-344h/LC-344c | <10 |
| HC-344e/LC-344h | <10 |
| HC-344h/LC-344h | <10 |

TABLE 32

| | Binding Affinity |
|---|---|
| Humanized anti-GFRAL | to Human GFRAL |
| Antibodies | K_{D} (pM) |
| 5F12 Hybridoma | 38 |
| HC-375d/LC-375a | 74 |
| HC-375d/LC-375c | 75 |
| HC-375d/LC-375g | 77 |
| HC-375d/LC-375i | 62 |
| HC-375d/LC-375j | 46 |
| HC-375e/LC-375a | 91 |
| HC-375e/LC-375c | 92 |
| HC-375e/LC-375g | 81 |
| HC-375e/LC-375j | 48 |
| HC-375h/LC-375g | 87 |
| HC-375h/LC-375j | 60 |
| HC-375g/LC-375a | 28 |
| HC-375g/LC-375j | 57 |

### Example 8: Functional Assays of Humanized Antibodies

[0494] Exemplary humanized anti-GFRAL antibodies described in Examples 6 and 7 were tested for their functional activity in cell-based reporter assays similar to that described in Example 3.

[0495] For example, ELK1-luciferase reporter assays, which measure human GDF15 (hGDF15)-induced human GFRAL/RET signaling, were performed using transfected U20S and HEK293T. The transfecting plasmids consisted of two reporter plasmids, Gal4-Elk1 and 5×UAS-Luc (Agilent Technologies PathDetect Elk1 trans-reporting system Cat #219005), and plasmids encoding human GFRAL (hGFRAL and human RET (hRET). In these assays, hGDF15-induced activation of recombinantly expressed GFRAL/RET receptor complex in the cells triggers intracellular signaling transduction, which leads to ERK and then Elk1 phosphorylation. Once Gal4-Elk1 is phosphorylated, Gal4-Elk1 binds to the 5×UAS promoter region and turns on luciferase reporter gene transcription. The activity of luciferase is then measured in luciferase enzymatic assays.

[0496] Representative results for exemplary humanized antibodies to GFRAL (e.g., 3P10 and 5F12) inhibiting human GFRAL/RET signaling are shown in Table 33 and 34 below and in FIG. 11.

TABLE 33

| Humanized anti-GFRAL | |
|---|---|
| Antibodies | IC₅₀ (nM) |
| 3P10 Hybridoma | 4.02 |
| HC-344a/LC-344c | 7.26 |
| HC-344a/LC-344h | 4.63 |
| HC-344h/LC-344c | 29.4 |
| HC-344e/LC-344h | 6.95 |
| HC-344h/LC-344h | 5.7 |

TABLE 34

| Humanized anti-GFRAL | |
|---|---|
| Antibodies | IC₅₀ (nM) |
| 5F12 Hybridoma | 5.40 |
| HC-375d/LC-375a | 3.86 |
| HC-375d/LC-375c | 3.28 |
| HC-375d/LC-375g | 2.79 |
| HC-375d/LC-375i | 2.75 |
| HC-375d/LC-375j | 3.11 |
| HC-375e/LC-375a | 2.81 |
| HC-375e/LC-375c | 2.20 |
| HC-375e/LC-375g | 2.27 |
| HC-375e/LC-375j | 4.01 |
| HC-375h/LC-375g | 3.98 |
| HC-375h/LC-375j | 7.29 |

[0497] For some experiments, the above mentioned four plasmids (e.g., 2 reporter plasmids, GFRAL, RET) were transfected into newly harvested cells in suspension using FuGene6 transfection reagent (Promega). The GFRAL and RET DNA ratio in transfection was optimized for the each pair of receptors from indicated species and varied between 12:1 to 60:1. Transfected cells were seeded into 384-well plate (7500 cells/25 μL/well) in normal growth medium. After overnight incubation at 37° C., a mix of serially diluted antibodies and fixed concentration of hGDF15 were added. After 6 hrs at 37° C. incubation with the antibodies, an equal volume of Bright-Glo reagent (Promega) was added and luminescence signal was read using Enspire reader (Perkin Elmer).

[0498] Simultaneous addition of humanized anti-GFRAL antibodies, antagonizing the hGDF15 effect, blocked hGDF15 signaling in a dose-dependent manner preventing expression of luciferase reporter gene.

### Example 9: Additional Functional Assays of Humanized Antibodies

[0499] Exemplary humanized anti-hGFRAL antibodies were tested for their hGDF15 antagonising activity in an additional cell-based assay, such as an U2OS assay stably expressing hGFRAL and hRET, as described in Example 4. One day before the assay, the cells were plated in 90 μl of DiscoveRx Assay Complete Cell Plating 16 Reagent (DiscoveRx, Cat #93-0563R16B) at 20K/each of 96 well plate. Next day the cells were treated with a mix of serially diluted antibodies and a fixed concentration of hGDF15 for 10 minutes at 37° C. Cis-bio Cellul'erk assay kit (Cat #64ERKPEH) was used to assay for ERK phosphorylation level following the manufacturer's protocol.

[0500] Similar to the Hek293T Elk1 reporter assay described in Example 4, humanized anti-hGFRAL antibodies (e.g., humanized 3P10) were able to prevent hGDF15-induced phosphorylation in a dose-dependent manner.

[0501] Representative results for humanized anti-GFRAL antibodies preventing hGDF15-induced phosphorylation are shown in Table 35 below and in FIG. 12.

TABLE 35

| Humanized anti-GFRAL | |
|---|---|
| Antibodies | IC₅₀ (nM) |
| 3P10 Hybridoma | 5.46 |
| HC-344a/LC-344c | 5.13 |
| HC-344a/LC-344h | 5.02 |
| HC-344h/LC-344c | 15.1 |
| HC-344e/LC-344h | 3.3 |
| HC-344h/LC-344h | 2.18 |

[0502] In a control experiment, GFRα1 (bound on chip surface) showed binding to its natural ligand GDNF (in solution, 50 nM) (see FIG. 13C).

[0503] Exemplary humanized anti-GFRAL antibodies (e.g. HC-344e+LC-344h) did not bind to receptor GFRα1, but showed high affinity binding to hGFRAL (FIGS. 13A and 13B) indicating specificity for GFRAL.

### Example 10: Animal Studies

[0504] The effects of anti-GFRAL antibodies were evaluated in multiple animal studies.

### A: Anti-GFRAL Antibodies Inhibit GDF15-Induced Weight Loss in DIO Mice (Acute)

[0505] To determine if an anti-GFRAL antibody is able to neutralize the GDF15-induced weight lowering effect in diet-induced obesity (DIO) mice, 17 week old male C57BL/6J DIO mice were used (Jackson Labs West, Sacramento, CA). Mice (41.3 g±0.4 g) were randomly assigned to receive an exemplary anti-GFRAL antibody (e.g., 1C1, 3P10, 17J16, 5A20, 25M22, 5F12, 8D8 and 12A3) or an anti-GDF15 antibody (e.g., 1MO3). Each group had 6 mice per group. Each treatment group had its own PBS control group. The antibody dosage was 20 mg/kg. One day post injections with either PBS or antibody, the mice then received 3 consecutive daily injections of a GDF15 protein (e.g., having an amino acid sequence of SEQ ID NO: 1811) at 0.5 mg/kg. Daily body weight and food intake were recorded (day 1-3 and day 7). Sartorius balance LE5201 was used for weighing. An automatic weighing record program (Sartorius YSW05 Software Wedge, Sartorius Mechatronics Corporation, 5 Orville Drive, Suite 200 Bohemia, NY 11716) was used to transmit the weight data to a Microsoft Excel spreadsheet automatically.

[0506] Data are presented by mean±sem in term of raw body weight, delta body weight change and percentage of body weight change (i.e., % of delta body weight change over baseline body weight). A Student's t-test was used (two tails, two ends). In these experiments, P<0.05 was considered as statistically significant.

[0507] Exemplary anti-GFRAL antibodies, 1C1, 3P10, 17J16, 5A20, 25M22, 5F12, 8D8 and 12A3, are able to reverse GDF15-induced body weight loss and food intake reduction (FIGS. 14A and 14B). An anti-GDF15 antibody also reversed GDF15-induced body weight loss and food intake reduction in this model.

[0508] To determine if a non-competitive anti-GFRAL antibody or a competitive anti-GFRAL antibody block exogenous GDF15-induced weight lowering effect in a dose-dependent manner, 19 week old male C57BL/6J DIO mice were used. Initially mice (43.1 g±0.3 g) were randomly assigned to PBS (8 mice per group) or a GDF15 protein (e.g., having an amino acid sequence of SEQ ID NO: 1811) groups (0.1 mg/kg, 1.0 mg/kg, or 10 mg/kg, 24 mice per group). A GDF15 protein was confirmed to reduce body weight and food intake dose-dependently in the following day. Furthermore, the GDF15 treatment groups (0.1 mg/kg, 1.0 mg/kg, or 10 mg/kg) were randomly assigned to receive PBS, or an exemplary anti-GFRAL antibody (e.g., 1C1 or 3P10) (8 mice per group). Daily body weight and food intake were recorded (day 1-3 and day 7).

[0509] Exemplary anti-GFRAL antibodies reversed body weight reduction and food intake reduction that was induced by GDF15 (FIGS. 15 and 16).

### B: Anti-GFRAL Antibodies Promote Body Weight Gain in DIO Mice (Chronic)

[0510] To determine if an exemplary anti-GFRAL antibody is able to increase body weight independent of exogenous GDF15 protein in a DIO model, 14 week old male C57BL/6J DIO mice were used (Jackson Labs West, Sacramento, CA). Mice (34.5 g±0.8 g) were randomly assigned to receive either PBS or exemplary anti-GFRAL antibodies (e.g., 1C1 or 3P10) at 10 mg/kg weekly. Each group had 10 mice per group. Daily body weight and food intake were recorded for 28 days. Sartorius balance LE5201 was used for weighing. An automatic weighing record program (Sartorius YSW05 Software Wedge, Sartorius Mechatronics Corporation, 5 Orville Drive, Suite 200 Bohemia, NY 11716) was used to transmit the weight data to a Microsoft Excel spreadsheet automatically. Body composition was also evaluated by EchoMRI.

[0511] Exemplary anti-GFRAL antibodies increased body weight (by 6% and 7%, respectively) and food intake (by 3.4% and 3.7%, respectively) in DIO Mice (FIGS. 17 and 18). The increase in body weight by the exemplary anti-GFRAL antibodies is mainly attributed to increased fat mass (FIG. 19).

### C: Anti-GFRAL Antibodies Reverse GDF-15-Induced Loss of Body Mass in DIO Mice

[0512] To determine if an exemplary anti-GFRAL antibody is able to neutralize the GDF15-induced weight lowering effect in DIO mice, 17 week old male C57BL/6J DIO mice were used (Jackson Labs West, Sacramento, CA) and a recombinant adeno-associated virus (rAAV) expressing GDF15 was constructed.

[0513] Construction of the rAAV was performed as follows: Polymerase chain reactions (PCR) reagents kits with Phusion® high-fidelity DNA polymerase were purchased from New England BioLabs (F-530L, Ipswich, MA). The PCR reactions were set up according to manufacturer's instruction. Amplified DNA fragments containing an Igk signal peptide followed by a GDF15 encoding sequence was digested with restriction enzymes Spe I and Not I (the restriction sites were included in the 5′ or 3′ PCR primers, respectively) and were then ligated with AAV transgene vectors that had been digested with the same restriction enzymes. The vector used for expression contained a selectable marker and an expression cassette composed of a strong eukaryotic promoter 5′ of a site for insertion of the cloned coding sequence, followed by a 3′ untranslated region and bovine growth hormone polyadenylation tail.

[0514] The DIO mice were subjected to a high fat diet (Research Diets, catalog #D12492NI). The high fat diet contained 60 kcal % fat, 20 kcal % protein and 20 kcal % carbohydrate. The mice were administered a one-time tail vein injection of the rAAV described above or a control AAV vector expressing green fluorescent protein (GFP). 42 days post injection with rAAV expressing the GDF15 at 1×10¹⁰, mice were administered the exemplary anti-GFRAL antibody (3P10) or a control antibody (anti-KLH antibody) at a dose of 3 mg/kg. There were 20 mice per group. Mice body weight, lean and fat mass, energy expenditure and food intake were monitored over 12 weeks.

[0515] As shown in FIG. 20, the exemplary anti-GFRAL antibody (3P10) reversed the GDF15-induced loss of body weight and loss of fat and lean mass in DIO mice. Additionally, as shown in FIG. 21, the exemplary anti-GFRAL antibody reversed the GDF15-induced increase in energy expenditure and GDF15-induced reduction in food intake.

### D: Anti-GFRAL Antibodies Reverse GDF-15-Induced Loss of Body Mass in Lean Mice (Chronic)

[0516] To determine if an exemplary anti-GFRAL antibody is able to neutralize the GDF15-induced weight lowering effect in lean mice, 15 week old male C57BL/6J mice were used (Jackson Labs West, Sacramento, CA). The mice were placed on a Chow Diet. As described in Example 11, part c, the mice were administered a one-time tail vein injection of the rAAV expressing GDF15 at 1×10¹⁰ or a control AAV vector expressing green fluorescent protein (GFP). 28 days post injection with rAAV expressing the GDF15, mice were administered the exemplary anti-GFRAL antibody (3P10) or a control antibody (anti-KLH antibody) at a dose of 3 mg/kg. There were 20 mice per group. Mice body weight, lean and fat mass, energy expenditure and food intake were monitored over 12 weeks.

[0517] As shown in FIG. 22, the exemplary anti-GFRAL antibody reversed the GDF15-induced loss of body weight, which included a reversal of both loss of fat mass and loss of lean mass in lean mice. Additionally, as shown in FIG. 23, the exemplary anti-GFRAL antibody reversed the GDF15-induced change in respitory exchange ratio (RER) and GDF15-induced reduction in food intake in lean mice.

### E: Anti-GFRAL Antibodies do not Increase Body Weight Independent of GDF15-Induced Weight Loss in Lean Mice

[0518] To determine if an exemplary anti-GFRAL antibody is able to increase body weight independent of exogenous GDF15 protein in lean mice, 15 week old male C57BL/6J mice were used (Jackson Labs West, Sacramento, CA). Mice (26.1 g±0.3 g) were randomly assigned to receive either PBS or an exemplary anti-GFRAL antibody (e.g., 1C1 or 3P10) at 10 mg/kg weekly. Each group had 10 mice per group. Daily food intake and body weight were recorded in the first week, and then recorded weekly for another 3 weeks. Sartorius balance LE5201 was used for weighing.

[0519] Repeat doses of exemplary anti-GFRAL antibodies 1C1 and 3P10 do not significantly alter body weight and food intake in lean mice, although antibody 3P10 showed a weak trend to increase body weight (FIGS. 24 and 25).

F: Anti-GFRAL Antibodies Reverse Body Weight Loss and Increased Energy Expenditure in Mice with Chronic Kidney Damage

[0520] To determine if an exemplary anti-GFRAL antibody is able to reverse loss of body weight and increased energy expenditure in DIO mice with chronic kidney damage, 15 week old male C57BL/6J mice were used (Jackson Labs West, Sacramento, CA). After 5 weeks on HFD+adenine diet (0.3% @ induction phase for 10 days, then reducing to 0.1% @ maintainance phase for another 3 weeks), DIO Mice (26.1 g±0.3 g) were randomly assigned to receive either control antibody (anti-KLH) or exemplary anti-GFRAL antibodies (e.g., 3P10) at 1 mg/kg weekly. Each group had 12 mice per group. Daily body weight was recorded in the first week, and then recorded weekly for another 8 weeks. Sartorius balance LE5201 was used for weighing.

[0521] As shown in FIG. 26A, in order to verify the effect of adenine on kidney function, 10-day treatment with dietary adenine (0.25% adenine in HFD) was shown to induce kidney damage in mice. Dietary adenine also increased serum GDF15 levels (see FIG. 26B) and promoted weight loss (see FIG. 26C). Additionally, dietary adenine increased energy expenditure in mice (see FIG. 27A).

[0522] As shown in FIG. 27B, the exemplary anti-GFRAL antibody reversed the increased energy expenditure in mice with chronic kidney damage. Additionally, as shown in FIG. 28, the exemplary anti-GFRAL antibody reversed the loss of body weight and loss of fat and lean mass in mice with chronic kidney damage.

### G: Humanized Anti-GFRAL Antibodies Inhibit GDF15-Induced Weight Loss in a Dose-Dependent Manner

[0523] To determine if an humanized anti-GFRAL antibody is able to neutralize the GDF15-induced weight lowering effect in diet-induced obesity (DIO) mice, 17 week old male C57BL/6J DIO mice were used (Jackson Labs West, Sacramento, CA). Initially mice (42 g±0.4 g) were randomly assigned to PBS (8 mice per group) or a GDF15 protein (56 mice per group). A GDF15 protein was confirmed to reduce body weight and food intake dose-dependently in the following day. Furthermore, 8 mice per group were randomly assigned to receive either an vehicle (anti-KLH) or an exemplary mouse anti-GFRAL antibody (e.g., m3P10) at a dosage of 1.0 mg/kg, or an exemplary humanized anti-GFRAL antibody (e.g., h3P10=HC-344e+LC-344h) at dosages of 0.1 mg/kg, 0.3 mg/kg, 1.0 mg/kg, 3 mg/kg or 10 mg/kg. Daily body weight was recorded (day 1-7). Sartorius balance LE5201 was used for weighing. An automatic weighing record program (Sartorius YSW05 Software Wedge, Sartorius Mechatronics Corporation, 5 Orville Drive, Suite 200 Bohemia, NY 11716) was used to transmit the weight data to a Microsoft Excel spreadsheet automatically.

[0524] Data are presented by mean±sem in term of delta body weight change. A Student's t-test was used (two tails, two ends).

[0525] Exemplary humanized anti-GFRAL antibody HC-344e+LC-344h is able to inhibit GDF15-induced body weight loss in a dose-dependent manner (FIG. 29).

### Example 11: Crystal Structure of GFRAL/GDF15 Complex

### A: Complex Formation and Crystallization

[0526] A complex of a GFRAL protein and a GDF15 protein was made by mixing 1.2 molar excess of a GFRAL (W115-E351) protein with 1 molar GDF15 protein subunit (0.5 molar GDF15, which is a homodimer of two GDF15 subunits linked by a pair of disulfide bonds). The complex was purified by size exclusion chromatography to remove excess GFRAL. The GFRAL/GDF15 complex was crystallized by mixing 1 μL protein at 5 mg/ml with 0.5 μL reservoir solution and 0.5 μL seed in a crystallization drop, with the reservoir solution containing 1.0 mL of 0.1 M Bis-Tris pH 6.0, 1.5 M (NH₄)₂SO₄ and 10% ethylene glycol. The seed crystals were obtained from a crystallization condition including a reservoir solution of 0.1 M Bis-Tris pH 6.0 and 1.5 M (NH₄)₂SO₄. The crystallization setup was kept at room temperature in Rigaku 24 well clover leaf plate. The crystallization drop showed small needle crystals after three days of incubation.

[0527] An exemplary small needle crystal of a comples of a GFRAL protein and a GDF15 protein is shown in FIG. 30.

[0528] The molecular model was not available for GFRAL, hence NaBr soaking was used to determine crystal phasing. A GFRAL/GDF15 crystal obtained as described above was soaked with 0.5 M NaBr and 0.75 M NaBr containing reservoir solution. After 30 minutes, 0.5 M NaBr soaked crystals were in good condition, whereas 0.75 M NaBr soaking yielded cracked crystals. Crystals from both soaks and un-soaked crystals were mounted with 30% EG as a cryo-protectant.

[0529] The model described herein provides the first structural information for a GFRAL protein and the binding of a GFRAL protein to a GDF15 protein.

### B: Data Collection and Structure Determination

[0530] GFRAL/GDF15 complex crystals were obtained and harvested from a 0.1 M Bis-Tris pH 6.0, 1.5 M (NH₄)₂SO₄ and 10% ethylene glycol reservoir condition as soaked and unsoaked crystals from 0.5 M and 0.7 M NaBr soaks. The crystals were treated with the mother liquor supplemented with 20% ethylene glycol as cryoprotectant and flash-frozen in liquid nitrogen. These crystals were then examined for x-ray diffraction at the synchrotron beamline IMCA-CAT, Advanced Photon Source, Argonne National Lab (ALS). The crystal diffracted up to 2.28-2.20 Å resolution.

[0531] X-ray diffraction statistics for exemplary GFRAL/GDF15 complex crystals are shown in Table 36.

TABLE 36

| Data collection statistics | Crystal I |
|---|---|
| Wave length | 0.9786 Å |
| Space group | P2₁ |
| Unit cell (Å) | a = 75.352 |
| | b = 88.768 |
| | c = 121.293 |
| Resolution (Å)^{†} | 50-2.20 |
| | (2.28-2.20) |
| Number of measurements | 118,710 |
| Number of unique reflections | 20,379 |
| R_{sym} (%)^{†} | 0.09 (0.58) |
| Completeness (%)^{†} | 97.4 (85.4) |
| I/σ^{†} | 18.9 (2.2) |
| Redundancy^{†} | 5.8 (4.9) |
| Molecules in the A.U. | 1 GFRAL |
| | 1 GDF15 |

^{†}The parenthesis is for the highest resolution shell in Å.

[0532] Molecular replacement of GFRAL/GDF15 was performed by using the scaled dataset with a previously solved GFRAL/GDF15 complex at 3.2 Å resolutions as a starting model and the rigid body refinement (See Vagin, A. A., et al., (2004) “REFMAC5 dictionary: Organization of prior chemical knowledge and guidelines for its use.” Acta Crystallogr. D 60:2284-2295) and initial positional refinement was completed in REFMAC5 as implemented in CCP4. Several rounds of model rebuilding resulted in structures of the GFRAL/GDF15 complex.

[0533] Exemplary structures of a complex of a GFRAL protein and a GDF15 protein are shown, for example, in FIG. 31-39B.

[0534] Inspection of the initial electron density maps showed unambiguous density for GFRAL and GDF15. After rigid body refinement, several rounds of model building and restrained refinement were performed using COOT (See Emsley, P. and Cowtan, K. (2004) “COOT: model-building tools for molecular graphics.” Acta Crystallogr. D 60:2126-2132). After placement of the solvent molecules final refinement was completed.

[0535] The atomic coordinates from the x-ray diffraction patterns for the GFRAL/GDF15 complex are found in Table 49.

[0536] Refinement statistics for exemplary crystals are shown in Table 37.

TABLE 37
Refinement Statistics

| | |
|---|---|
| Refinement Range (Å) | 35.82-2.20 |
| R_{cryst} (%) | 20.1 |
| R_{free} (%) | 26.2 |
| Molecules GDF15, GFRAL; | 1, 1; 132 |
| Water molecules | |
| Bond lengths (Å) | 0.019 |
| Bond angles (°) | 1.943 |
| Average B-factors (Å²) | Overall |
| Main chain atoms (GDF15, GFRAL) | 43.9, 57.6 |
| Side chain atoms (GDF15, GFRAL) | 51.2, 66.8 |
| Water molecules | 56.7 |
| Ramachandran Plot (%) | Overall |
| Favored | 96.3 |
| Allowed | 2.7 |
| Disallowed | 1.0 |

[0537] The clear electron density for GFRAL in an exemplary GFRAL/GDF15 complex crystal is illustrated in FIG. 31. FIG. 31 shows an electron density map (2fo-fc) for the GFRAL molecule calculated with 2.20 Å resolution data and contoured at the 10 level. The GFRAL residues are clearly visible.

### C: Crystal Structure of GFRAL/GDF15 Complex

[0538] The crystal structure of a complex of a GFRAL protein and a GDF15 protein was determined.

[0539] Core interaction interface amino acids were determined as being the amino acid residues (on a protein such as GFRAL) with at least one atom less than or equal to 4.5 Å from the GFRAL interacting proteins (such as GDF15). 4.5 Å was chosen as the core region cutoff distance to allow for atoms within a van der Waals radius plus a possible water-mediated hydrogen bond.

[0540] Boundary interaction interface amino acids were determined as the amino acid residues (on a protein such as GFRAL) with at least one atom less than or equal to 5 Å from core interaction interface amino acids on GFRAL that interact with GFRAL interacting proteins (such as GDF15). Less than or equal to 5 Å was chosen as the boundary region cutoff distance because proteins binding to residues less than 5 Å away from core interaction interface amino acids on GFRAL will be within the van der Waals radius of GFRAL interacting proteins.

[0541] Amino acids that met these distance criteria were calculated with the Molecular Operating Environment (MOE) program from CCG (Chemical Computing Group).

[0542] FIG. 32 shows an exemplary illustration of a heterodimeric GFRAL/GDF15 complex, as found in the asymmetric unit of a GFRAL/GDF15 protein crystal. The dimeric molecule GDF15 has one intermolecular disulfide link, which was found to be weak due to radiation damage. One side of a GDF15 molecule can form a dimer in the asymmetric unit. FIG. 33 shows an exemplary dimeric arrangement of the GFRAL/GDF15 hetero dimers in a GFRAL/GDF15 crystal.

[0543] FIG. 34A-34B illustrate the extent of the protein-protein contacts on a GFRAL-GDF15 interface. The contact region on GFRAL is indicated by light gray arrows; the contact region on GDF15 is indicated by the black arrows.

[0544] FIG. 35 shows that three-helices of GFRAL are involved in a GFRAL/GDF15 interface. Multiple disulfide bridges appear to stabilize the structural arrangement of the three GFRAL-helices.

[0545] FIGS. 36A-36D illustrate different aspects of a GFRAL/GDF15 interface and the core and boundary amino acid residues of a GFRAL protein and a GDF15 protein involved in forming a GFRAL/GDF15 interface. The GFRAL protein and the GDF15 protein are depicted as ribbon diagrams with residues in the GFRAL/GDF15 interface shown in a space-filled surface representation. FIGS. 36A-36C show core interaction interface amino acids of the GFRAL protein and the GDF15 protein. FIG. 36D shows boundary interaction interface amino acids.

[0546] The amino acid sequence of a full-length precursor human GFRAL protein is shown below:

```
GERAL sequences
SEQ ID NO: 1797
                10 20 30 40
NIVFIFLAMG LSLENEYTSQ TNNCTYLREQ CLRDANGCKH
                50 60 70 80
AWRVMEDACN DSDPGDPCKM RNSSYCNLSI QYLVESNFQF
                90 100 110 120
KECLCTDDFY CTVNKLLGKK CINESDNVKE DKFKWNLTTR
              130 140 150 160
SHHGFKGMWS CLEVAEACVG DYVCNAQLAS YLKACSANGN
              170 180 190 200
PCDLKQCQAA IRFFYQNIPF NIAQMLAFCD CAQSDIPCQQ
              210 220 230 240
SKEALHSKTC AVNMVPPPTC LSVIRSCQND ELCRRHYRTF
              250 260 270 280
QSKCWQRVTR KCHEDENCIS TLSEQDLTCS GSDDCEAAYI
              290 300 310 320
DILGTVLQVQ CTCRTITQSE ESLKKIFQHM LHRESCFNYP
              330 340 350 360
TLSNVEGMAL YTRKHANKIT LTGFHSPFNG EVIYAAMCNT
              370 380 390
VTCGILLLVM VKLRTSRISS KARDPSSIQI 9GEL
```

[0547] GFRAL amino acids at the interface of the GFRAL/GDF15 complex are shown in Table 38.

TABLE 38
GFRAL Residues Binding GDF15*

| Core interaction | Boundary interaction |
|---|---|
| interface amino acids | interface amino acids |
| GLY140 | SER156 |
| LEU148 | GLN147 |
| ALA149 | LEU148 |
| ALA146 | ALA149 |
| VAL142 | SER150 |
| ASN145 | TYR151 |
| VAL139 | LEU152 |
| ALA135 | LYS153 |
| GLU136 | ALA154 |
| LEU152 | CYS155 |
| LEU132 | PHE174 |
| SER201 | TYR175 |
| ALA204 | GLU136 |
| LEU205 | ALA137 |
| LYS153 | CYS138 |
| ILE196 | VAL139 |
| PRO197 | GLY140 |
| GLN200 | ASP141 |
| | VAL142 |
| | VAL143 |
| | CYS144 |
| | ASN145 |
| | ALA146 |
| | LEU186 |
| | CYS189 |
| | CYS191 |
| | ALA192 |
| | GLN193 |
| | SER194 |
| | ASP195 |
| | ILE196 |
| | PRO197 |
| | CYS198 |
| | GLN199 |
| | GLN200 |
| | SER201 |
| | LYS202 |
| | GLU203 |
| | ALA204 |
| | LEU205 |
| | HIS206 |
| | SER207 |
| | SER130 |
| | CYS131 |
| | LEU132 |
| | GLU133 |
| | VAL134 |
| | ALA135 |

*GFRAL amino acid numbering according to SEQ ID NO: 1797

[0548] The amino acid sequence of mature human GDF15 is shown below: ARNGDHCPLG PGRCCRLHTV RASLEDLGWA DWVLSPREVQ VTMCIGACPS QFRAANMHAQ IKTSLHRLKP DTVPAPCCVP ASYNPMVLIQ KTDTGVSLQT YDDLLAKDCH CI (SEQ ID NO: 1811)

[0549] GDF15 residues at the interface of the GFRAL/GDF15 complex are shown in Table 39.

TABLE 39
Residues on GDF15 that bind to GFRAL*

| Core interaction | Boundary interaction |
|---|---|
| interface amino acids | interface amino acids |
| SER35 | SER35 |
| LEU34 | VAL33 |
| THR94 | LEU34 |
| GLY95 | ASP93 |
| GLN40 | THR94 |
| VAL96 | GLY95 |
| LEU98 | VAL39 |
| PRO36 | GLN40 |
| VAL87 | ARG37 |
| LEU88 | GLU38 |
| ILE89 | VAL96 |
| ASP102 | SER97 |
| THR100 | LEU98 |
| PRO85 | PRO36 |
| MET86 | VAL87 |
| | LEU88 |
| | ILE89 |
| | VAL41 |
| | GLN90 |
| | LYS91 |
| | THR92 |
| | THR42 |
| | LEU104 |
| | LEU105 |
| | TYR101 |
| | ASP102 |
| | ASP103 |
| | GLN99 |
| | THR100 |
| | LEU24 |
| | TRP32 |
| | TRP29 |
| | ARG21 |
| | THR19 |
| | TYR83 |
| | ASN84 |
| | PRO85 |
| | MET86 |
| | VAL20 |

*GDF15 amino acid numbering according to SEQ ID NO: 1811

### D: Model of GFRAL/RET/GDF15 Complex

[0550] The RET/GFRα1/GDNF ternary complex described by Goodman et al. (2014) CELL REPORTS 8, 1894-1904 (PDB 4UX8) was used as a template to build a model of the complex of GFRAL/GDF15/RET (from GFRAL/GDF15 structure, see, e.g., Examples 11-13). The RET/GFRα1/GDNF template resulted from an electron microscopy reconstruction of a reconstituted mammalian RET (ECD)-GDNF-GFRα1 ternary complex (Goodman et al., supra).

[0551] To compare the structural similarity of the GFRAL/GDF15 crystal structure from Example 12 and the structure of GFRα1/GDNF in the RET/GFRα1/GDNF template, the GFRAL structure in GFRAL/GDF15 crystal was superposed with GFRα1 in GFRα1/GDNF/RET model (PDB 4UX8) using MOE from CCG. The high quality of the superposition, and therefore the structural similarity of the GFRAL/GFRα1 and GFRAL/GDF15 complexes was demonstrated by an RMSD of GFRAL/GFRα1 backbone residues of 2.21 Å. This ternary complex model, including the GFRAL/GDF15 structure and the RET structure, was used to map the interactions between GFRAL and RET

[0552] FIGS. 37A-37B illustrate exemplary aspects of the superposition of GFRAL and GFRα1 in 4XU8. RMSD of backbone residues was 2.21 Å.

[0553] FIGS. 38A-38D illustrate exemplary aspects of the interaction of a GFRAL protein with a RET protein in a RET/GFRAL/GDF15 model. In FIG. 38A, interacting GFRAL and GDF15 residues at the GFRAL/GDF15 interface as modeled are represented by stick models. In FIG. 38B, the RET-interacting residues on GFRAL are depicted in a space filled surface model. In FIG. 38C, the space filled surface model of the core interaction residues are highlighted on GFRAL and RET. In FIG. 38D, the space filled surface model of the boundary interaction residues are highlighted on GFRAL and RET.

[0554] FIGS. 39A-39B illustrate the core and boundary amino acid residues on a GFRAL protein identified in space filled surface models at the modeled RET interface. In FIG. 39A, core residues on GFRAL as modeled are shown in a darker grey in a space-filled surface model. In FIG. 39B, boundary residues on GFRAL as modeled are shown in a lighter grey in a space filled surface model.

[0555] Based on this modeling, a number of GFRAL residues were identified for interaction with RET residues, as shown in Table 40A. Additionally, a number of RET residues were identified for interaction with GFRAL residues, as shown in Table 40B.

TABLE 40A
Residues on GFRAL that bind to
RET in RET/GFRAL/GDF15 Model

| Core interaction | Boundary interaction |
|---|---|
| interface amino acids | interface amino acids |
| GLN246 | ILE224 |
| ARG247 | ARG225 |
| ARG250 | GLN241 |
| LYS251 | SER242 |
| CYS252 | LYS243 |
| ASP255 | CYS244 |
| GLU256 | TRP245 |
| ASN257 | GLN246 |
| CYS258 | ARG247 |
| ILE259 | VAL248 |
| SER260 | THR249 |
| THR261 | ARG250 |
| LEU262 | LYS251 |
| THR297 | CYS252 |
| GLN298 | HIS253 |
| SER299 | GLU254 |
| | ASP255 |
| | GLU256 |
| | ASN257 |
| | CYS258 |
| | ILE259 |
| | SER260 |
| | THR261 |
| | LEU262 |
| | SER263 |
| | LYS264 |
| | GLN265 |
| | ASP266 |
| | LEU267 |
| | THR268 |
| | THR295 |
| | ILE296 |
| | THR297 |
| | GLN298 |
| | SER299 |
| | GLU300 |
| | GLU301 |
| | SER302 |
| | LEU303 |
| | ILE306 |
| | PHE307 |
| | MET310 |

TABLE 40B
Residues on RET that bind to GFRAL
in RET/GFRAL/GDF15 Model

| Core interaction | Boundary interaction |
|---|---|
| interface amino acids | interface amino acids |
| GLY74 | ASP34 |
| THR75 | ALA35 |
| TYR76 | TYR36 |
| ARG77 | HIS71 |
| THR78 | TYR73 |
| ASN113 | LEU72 |
| ARG114 | GLY74 |
| PHE116 | TYR76 |
| TYR122 | THR75 |
| GLN138 | ARG77 |
| ARG144 | THR78 |
| PRO305 | ARG79 |
| ALA306 | LEU80 |
| LEU310 | LEU109 |
| | SER110 |
| | VAL111 |
| | ARG112 |
| | ASN113 |
| | GLY115 |
| | ARG114 |
| | PHE116 |
| | PRO117 |
| | LEU118 |
| | THR120 |
| | VAL121 |
| | TYR122 |
| | LEU123 |
| | LYS124 |
| | CYS137 |
| | GLN138 |
| | TRP139 |
| | PRO140 |
| | GLY141 |
| | CYS142 |
| | ALA143 |
| | ARG144 |
| | VAL145 |
| | TYR146 |
| | PHE147 |
| | ARG231 |
| | ASP264 |
| | ASP300 |
| | VAL303 |
| | VAL304 |
| | PRO305 |
| | ALA306 |
| | SER307 |
| | GLY308 |
| | GLU309 |
| | LEU310 |
| | ARG312 |
| | VAL311 |
| | ASN336 |

### Example 12: Crystal Structures of GFRAL/Antibody Complexes

### A1: Complex Formation and Crystallization of GFRAL/3P10/25M22 Fab Complex

[0556] A complex of a GFRAL protein, a 3P10 Fab and a 25M22 Fab (GFRAL/3P10/25M22 Fab complex) was formed by mixing GFRAL (W115-E351) with Fabs of 3P10 and 25M22 in a 1:1.2:1.2 molar ratio of GFRAL:3P10 Fab:25M22 Fab. The complex was purified from excess Fab molecules on a size exclusion chromatography column. The GFRAL/3P10/25M22 Fab complex was concentrated and crystallized as follows.

[0557] A volume of 1.5 mL of 3P10 Fab::GFRAL::25M22 Fab complex sample was concentrated by centrifugation to about 6.6 mg/mL using 10,000 MWCO Centricon® concentrator. The concentrated sample was immediately subjected to crystallization screening using 1 μL protein plus 1 μL reservoir per experiment. A first set of 96 conditions were set up that covered a factorial-based formulation sampling for the reservoir content. The crystallization setups were incubated at room temperature. Hampton Index and PegRx crystallization screens were used in the initial rounds of crystallization. The Hampton Index screen did not yield any potential hits, whereas the PegRx sreen yielded crystals under the following three crystallization conditions B11, D11, and H8:
[0558] B11: 0.1 M MES pH 6.0, 20% PEGMME 2000
[0559] D11: 0.1 M Imidazole pH 7, 0, 12%, PEG 20,000.
[0560] H8: 0.1 M TRIS pH 8.0, 16% PEG 10,000, 0.2 M Amonium Acetate.

[0561] Exemplary crystals of GFRAL/3P10/25M22 Fab complexes obtained under crystallization conditions B11, D11, and H8 are shown in FIG. 40.

[0562] To further optimize crystals for X-ray diffraction, GFRAL/3P10/25M22 complex was concentrated to 5.0 mg/mL and set up for crystallization and additional optimization, which led to improved crystals. Some improved crystals had a trapezium form. Some of the improved crystals were harvested, treated with a compatible cryoprotectant, and flash-frozen in liquid nitrogen. Identification and use of a compatible cryoprotectant was important to maintain sample crystallinity and to collect a high quality X-ray diffraction data set. Improved crystals obtained from a crystallization condition including 0.1 M Imidazole pH 7.0, 12% PEG 20,000 (D11) were treated with 35% ethylene glycol. Multiple crystals were flash-frozen in liquid nitrogen and X-ray diffraction data was collected at a synchrotron (ALS). One crystal diffracted to about 2.9 Å resolution. A full X-ray diffraction dataset was collected with this crystal.

[0563] The GFRAL/3P10/25M22 Fab complex crystal structure was determined. The position of the GFRAL component was clearly identified by molecular replacement based on the higher-helix content in GRAL compared to 3P10 and 25M22 Fabs. In the exemplary crystal described here, one GFRAL and two Fab components (one 3P10 Fab and one 25M22 Fab) formed a ternary complex in the asymmetric crystal unit.

[0564] Molecular replacement was used to identify Fabs in the GFRAL/3P10/25M22 Fab complex. PDB 1F8T, was the closest GFRAL homolog available for molecular replacement analysis (˜54% identity and ˜79% similarity to GFRAL). The structure solution clearly showed all Fab and GFRAL amino acid positions. The 1F8T GFRAL homolog structure was used as a stepping stone to solve the Fab and GFRAL components of the GFRAL/3P10/25M22 terniary complex crystal structure. In this structure, the stoichiometry in the was determined to be 1:1:1 3P10 Fab:: GFRAL::25M22 Fab.

### A2: Complex Formation and Crystallization of GFRAL/8D8/5f12 Fab Complex

[0565] A complex of a GFRAL protein, an 8D8 Fab and a 5F12 Fab (GFRAL/8D8/5F12 Fab complex) was formed by mixing GFRAL (W115-E351) with Fabs of 8D8 and 5F12 in a 1:1.2:1.2 molar ratio of GFRAL:8D8 Fab:5F12 Fab. The complex was purified from excess Fab molecules on a size exclusion chromatography column. The GFRAL/8D8/5F12 Fab complex was concentrated and crystallized as follows.

[0566] GFRAL/5F12/8D8 Fab complex was concentrated by centrifugation using 10,000 MWCO Centricon® concentrator. The concentrated sample was immediately subjected to crystallization screening using 1 μL protein plus 1 μL reservoir per experiment. A set of 96 conditions were initially set up that cover a factorial-based formulation sampling for the reservoir content. The crystallization setups were incubated at room temperature. Positive leads from initial screens were further optimized to yield high quality crystals that were amenable to diffraction analysis.

[0567] A volume of 1.5 mL of 5F12 Fab::GFRAL::8D8 Fab complex sample is concentrated by centrifugation to about 7.8 mg/mL using 10000 MWCO Centricon concentrator. Immediately upon completion, this sample is subjected to crystallization screening using 1 L protein plus 1 μL reservoir per experiment. A set of 96 conditions are initially setup that cover a factorial-based formulation sampling for the reservoir content. These setups are incubated at room temperature. Initially, Hampton Index and PegRx crystallization screens were used for crystallization, Index and PegRx gave crystals in the following three crystallization conditions C6, E11, and C2:
[0568] C6: 0.1 M Bis-Tris pH 6.5, 14% PEG 3350
[0569] E11: 1.7 M AmSO4, 0.1 M Bis-Tris pH 6.5, 3% PEG MME 550.
[0570] C2: 0.1 M Imidazole pH 7.0, 20% Jeffamine 2001.

[0571] Preliminary crystals were obtained as shown in FIG. 41.

[0572] Optimization of PegRx C6 and C2 crystallizing conditions was conducted by micro seeding technique, which lead to suitable diffraction mono-crystals. These suitable diffraction mono-crystals have a hexagonal bipyramid form obtained in 10% Ethylene glycol with 0.1 M Imidazole pH 7.0, 20% Jeffamine 2001 pH 7.0. Some of these crystals were harvested; treated with a compatible cryoprotectant; and flash-frozen in liquid nitrogen. Use of a compatible cryoprotectant is important to maintain the sample crystallinity, which results in a workable data set. The crystals were treated 20% MPD obtained from 0.1 M Imidazole pH 7.0, 20% Jeffamine 2001 pH 7.0.

### B1: Data Collection and Structure Determination of GFRAL/3P10/25M22 Fab Complex

[0573] X-Ray diffraction data was collected for twenty crystals of the GFRAL/3P10/25M22 Fab complex at a synchrotron (ALS). The first ten crystals yielded one complete data set with a resolution of 3.17 \acute{Å}. Ten additional crystals that were further optimized diffracted up 2.9 \acute{Å}, and this data set was used for structure determination and refinement. The X-ray diffraction data was indexed using DENZO and subsequently integrated and scaled with SCALEPACK from the program suite HKL2000. See Otwinowski Z. and Minor W. “Processing of X-ray Diffraction Data Collected in Oscillation Mode,” METHODS IN ENZYMOLOGY, Volume 276: Macromolecular Crystallography, part A, p. 307-326, 1997, C. W. Carter, Jr. & R. M. Sweet, Eds., Academic Press (New York). The X-ray diffraction of the selected crystal was identified as having an orthorhombic Bravais lattice symmetry. The space group was determined to be P2₁2₁2₁ based on the systematic absences along (h, 0, 0), (0, k, 0), and (0, 0, l) axes. Analysis of the Matthew's coefficient suggests the crystal's asymmetric unit may accommodate one assembly with approximately 124.4 kDa and a corresponding solvent content of 56%.

[0574] X-ray diffraction statistics for exemplary GFRAL/3P10/25M22 Fab complex crystals are shown in Table 41.

TABLE 41

| Data collection statistics | Crystal I |
|---|---|
| Wavelength | 0.9774 Å |
| Space group | P2₁2₁2₁ |
| Unit cell (Å) | a = 52.500 |
| | b = 116.045 |
| | c = 227.048 |
| Resolution (Å)^{†} | 50-2.91 |
| | (3.01-2.91) |
| Number of measurements | 227,808 |
| Number of unique reflections | 31,548 |
| R_{sym} (%)^{†} | 0.11 (0.86) |
| Completeness (%)^{†} | 100 (100) |
| I/σ^{†} | 17.8 (2.7) |
| Redundancy^{†} | 7.2 (7.2) |
| Molecules in the A.U. | 2 Fabs |
| | 1 GFRAL |

^{†}The parenthesis is for the highest resolution shell in Å.

[0575] Molecular replacement of the GFRAL/3P10/25M22 Fab Complex was performed by using the scaled dataset with the previously solved GFRAL (see Example 12, part C) and the 79% homologous GFRAL structure of 1F8T as starting models within the program PHASER. Data extending from 40-3.5 Å resolution gave one GFRAL and one Fab. Molrep yielded one more Fab in the structure solution. The solution had a complex of one GFRAL and two Fabs in the asymmetric unit. The solution was refined using REFMAC. COOT was used for model building. The refinement density clearly indicates missing loops in Fabs and GFRAL. After placement of a few solvent molecules final refinement was completed.

[0576] The atomic coordinates from the x-ray diffraction patterns for the GFRAL/3P10/25M22 Fab Complex are found in Table 50.

[0577] Exemplary refinement statistics of a GFRAL/3P10/25M22 Fab Complex crystal structure are shown in Table 42.

TABLE 42
Refinement Statistics

| | |
|---|---|
| Refinement Range (Å) | 47.7-2.9 |
| R_{cryst} (%) | 23.6 |
| R_{free} (%) | 31.0 |
| Molecules 3P10 Fab::GFRAL::25M22 Fab | 1, 1, 1 |
| Bond lengths (Å) | 0.011 |
| Bond angles (°) | 1.651 |
| Average B-factors (Å²) | Overall |
| Main chain atoms (GFRAL) | 66.3 |
| Side chain atoms (GFRAL) | 71.6 |
| Main chain atoms (3P10) Hc:Lc | 92.7; 75.5 |
| Side chain atoms (3P10) Hc:Lc | 89.8; 78.5 |
| Main chain atoms (25M22) Hc:Lc | 85.5; 101.9 |
| Side chain atoms (25M22) Hc:Lc | 83.4; 101.2 |
| Water molecules | 67.1 |
| Ramachandran Plot (%) | Overall |
| Favored | 78.3 |
| Allowed | 20.6 |
| Disallowed | 1.2 |

[0578] The clear electron densities of CDR regions in each chain of the 3P10 and 25M22 Fab fragments in the GFRAL/3P10/25M22 Fab complex are illustrated in FIG. 42 (electron density 2mFo-DFc weighted, 1.0 contour level). The 3P10 and 25M22 chains were identified clearly in the electron density, with the exception of region 131-137 in the 3P10 heavy chain (Chain-H), where a few terminal residues were not identified in the electron density.

### B2: Data Collection and Structure Determination of GFRAL/8D8/5F12 Fab Complex

[0579] The crystals were examined at the synchrotron at APS. Twenty five such crystals were examined for x-ray diffraction. Sixteen crystals were send first time to synchrotron which yielded a diffraction >5 Å and the second round of optimized crystals were diffracted up 3.5 \acute{Å}, which is used for structure determination and refinement. The X-ray diffraction data were indexed using DENZO and integrated and scaled with SCALEPACK from the program suite HKL2000 (Otwinowski and Minor, 1997). The X-ray diffraction of the selected crystal was identified as having an orthorhombic Bravais lattice symmetry. The space group was determined to be P6₅22 based on the systematic absences along (h, 0, 0) axes. Analysis of the Matthew's coefficient suggests the crystal's asymmetric unit may accommodate one assembly with approximately 246.6 kDa and a corresponding solvent content of 61%. The structure solution was checked with enantiomeric spacegroup P6₁22, which gave very poor Rfactor and Rfree during the rigid body and restraint refinement.

[0580] X-ray diffraction statistics for the GFRAL/8D8/5F12 complex crystals are shown in Table 43.

TABLE 43

| Data collection statistics | Crystal I |
|---|---|
| Wavelength | 0.9787 Å |
| Space group | P6₅22 |
| Unit cell (Å, °) | a = 133.021 |
| | b = 133.021 |
| | c = 564.819 |
| | γ = 120 |
| Resolution (Å)^{†} | 50-3.55 |
| | (3.68-3.55) |
| Number of measurements | 524,288 |
| Number of unique reflections | 37,081 |
| R_{sym} (%)^{†} | 0.13 (1.00) |
| Completeness (%)^{†} | 100 (100) |
| I/σ^{†} | 22.0 (3.4) |
| Redundancy^{†} | 14.1 (14.6) |
| Molecules in the A.U. | 4 Fabs |
| | 2 Receptor |

^{†}The parenthesis is for the highest resolution shell in Å.

[0581] Molecular replacement of Fabs/Receptor was performed by using the scaled dataset with the previously solved of fab pdb:3IU4 used for 8D8 (89% homologous) and pdb:4M7K used for 5F12 (84% homologous) were used as a starting models within the program PHASER using the data extending from 40-5.0 Å resolution gave two assembly of one receptor and two Fabs. The solution had two receptors and four Fabs complex in the asymmetric unit. The solution was refined used REFMAC and Coot was used for model building.

[0582] The structure solution was checked with enantiomeric spacegroup P6₁22. The Molrep gave two receptors and four Fabs complex. The Molrep model further submitted to Refmac for refinement end up with very poor R_{factor} and R_{free} during the rigid body and restraint refinement which confirms that the current space group is P6₅22.

[0583] The atomic coordinates from the x-ray diffraction patterns for the GFRAL/8D8/5F12 Fab Complex is found in Table 51.

[0584] Exemplary refinement statistics of a GFRAL/8D8/5F12 Fab Complex crystal structure are shown in Table 44.

TABLE 44
Refinement Statistics

| | |
|---|---|
| Refinement Range (Å) | 49.2-3.55 |
| R_{cryst} (%) | 25.1 |
| R_{free} (%) | 35.8 |
| Molecules 3P10 Fab::GFRAL::25M22 | 2, 2, 2 |
| Bond lengths (Å) | 0.011 |
| Bond angles (°) | 1.63 |

[0585] The clear electron density of one GFRAL protein with the 8D8 and 5F12 Fab fragments (two Fab chains) in the GFRAL/8D8/5F12 Fab complex is illustrated in FIG. 43 (electron density 2mFo-DFc weighted, 1.00 contour level). The refinement density clearly indicates most of the loops in Fabs and receptor molecule. The 5F12 and 8D8 chains were identified clearly in the electron density except for the region between amino acids 139-142 in chain-I (5F12 vH), 132-136 in chain-R (8D8 vH) and 131-136 in chain-U (8D8 vL), as well as a few terminal residues were not identified in the density.

### C1: Crystal Structure of GFRAL/3P10/25M22 Fab Complex

[0586] The crystal structure of a 3P10 Fab::GFRAL::25M22 Fab complex was determined.

[0587] 3P10 Fab and 25M22 Fab amino acid sequences are shown below, with VH and VL sequences bolded and CDR regions bolded and underlined.

3P10 Fab Hc:
(SEQ ID NO: 1824)
QIQLVQSGPELKKPGETVKISCKASGYTFTDYGVIWVKQAPGKAL
KWMGWINTYTGEPTYADDLKGRFAFSLETSASSASLQINNLKNED
TATYFCARRYGPEDIDYWGQGTTLTVSSASTKGPSVFPLAPSSKS
TSGGTAALGCLVKDYFPEPVTVSWNSGALTSGVHTFPAVLQSSGL
YSLSSVVTVPSSSLGTQTYICNVNHKPSNTKVDKKVEPKSCDEVD
3P10 Fab Lc:
(SEQ ID NO: 1825)
DIVLTQSPVSLAVSLGQRATISCRASESVDNYGISFMSWFQQKPG
QPPKLLIYAASHQGSGVPARFSGSGSGTDFSLNIHPMEEDDSAMY
FCLQSKEVPWTFGGGTKLEIKRTVAAPSVFIFPPSDEQLKSGTAS
VVCLLNNFYPREAKVQWKVDNALQSGNSQESVTEQDSKDSTYSLS
STLTLSKADYEKHKVYACEVTHQGLSSPVTKSFNRGEC
25M22 Fab Hc:
(SEQ ID NO: 1826)
QVQLQQSGPDLVKPGASVKISCKASGYTFTSYWVNWMKQRPGKGL
EWIGRIYPGDGDTNYNGKFKGKATLTADKSSSTAYMQLSSLTSED
SAVYFCARAYLLRLRRTGYYAMDYWGQGTSVTVSSASTKGPSVFP
LAPSSKSTSGGTAALGCLVKDYFPEPVTVSWNSGALTSGVHTFPA
VLQSSGLYSLSSVVTVPSSSLGTQTYICNVNHKPSNTKVDKKVEP
KSCDEVD
25M22 Fab Lc:
(SEQ ID NO: 1827)
DVVLTQTPLSLPVNIGDQASISCKSTKSLLNSDEFTYLDWYLQKP
GQSPQLLIFLVSNRFSGVPDRFSGSGSGTDFTLKISRVEAEDLGV
YYCFQSNYLPYTFGGGTKLEIKRTVAAPSVFIFPPSDEQLKSGTA
SVVCLLNNFYPREAKVQWKVDNALQSGNSQESVTEQDSKDSTYSL
SSTLTLSKADYEKHKVYACEVTHQGLSSPVTKSFNRGEC

[0588] FIG. 44 illustrates an aspect of a 3P10 Fab::GFRAL::25M22 Fab complex by a ribbon diagram. The Fab fragments interact with an asymmetric unit of GFRAL in the 3P10 Fab::GFRAL::25M22 Fab complex crystal. The crystal structure also showed that GFRAL epitope residues 290-312 were presented to the 3P10 antibody and GFRAL N-terminal epitope residues 130-157 were presented to the 25M22 antibody heavy chain CDR regions.

[0589] FIG. 45 illustrates CDR regions of 3P10 and 25M22 Fabs with interacting GFRAL and Fab residues highlighted in boxes.

[0590] FIGS. 46-48 illustrate aspects of GFRAL interactions with 3P10 and 25M22L Fabs in ribbon diagrams with select amino acid residues shown as stick models. For example, FIG. 46 illustrates aspects of a GFRAL epitope in the vicinity of the 3P10 heavy chain CDR region. The CDR sequences of 3P10 Hc are shown in FIG. 45. As another example, FIG. 47 illustrates aspects of a GFRAL epitope in the vicinity of the 3P10 light chain CDR region. The CDR sequences of 3P10 Lc are shown in FIG. 45. As another example, FIG. 48 illustrates aspects of a GFRAL epitope in the vicinity of the 25M22 heavy chain CDR region. The CDR sequences of 25M22 Lc are shown in FIG. 45.

[0591] An analysis of the GFRAL epitope presented to 25M22 Fab in the 3P10 Fab::GFRAL::25M22 Fab complex crystal structure showed that 25M22's mechanism of action is that of a competitive GDF15 inhibitor and involves blocking GDF15 binding to GFRAL. Exemplary core interaction interface amino acids on the GFRAL protein and on the 25M22 Fab CDRs for the heavy and light chains are shown in FIG. 49.

[0592] FIGS. 50A and 50B illustrates the core amino acids residues in the GFRAL/25M22 Fab interaction interface. FIG. 50A illustrates the structure of GFRAL with the core 25M22 interaction interface amino acids (binding epitope) on GFRAL highlighted in a space-filled surface model. Core interface amino acids on 25M22 CDRs for GFRAL are also highlighted in a space-filled surface model. FIG. 50B illustrates the structure of GFRAL in a ribbon diagram with core 25M22 Fab interaction interface amino acids on GFRAL (GFRAL epitope residues) highlighted in a space-filled surface model.

[0593] FIG. 51 illustrates boundary interaction interface amino acids on GFRAL for GFRAL/25M22 Fab binding. Boundary of interaction interface amino acids on GFRAL (for 25M22 Fab binding) are highlighted as space-filled surface models.

[0594] FIGS. 52-53 illustrate the overlap of GFRAL epitopes for 25M22 Fab and GDF15 binding on GFRAL. Two side views of a GFRAL ribbon diagram are shown in the left and right panels of FIG. 52. FIG. 53 shows a top view of the overlapping GFRAL epitopes for 25M22 Fab and GDF15 binding. Core interaction interface amino acids residues on GFRAL for 25M22 Fab and GDF15 binding are highlighted in a space-filled surface model. Light gray surface shading represents GFRAL surface covered by 25M22 Fab, whereas dark gray surface shading (highlighted by black arrows) shows GFRAL surface covered by GDF15.

[0595] GFRAL amino acids at the interface of the GFRAL/25M22 Fab complex are shown in Table 45. To compare the interaction interface amino acids in GFRAL/25M22 Fab and GFRAL/GDF15 complexes, Table 45 further lists the GFRAL amino acids at the interface of the GFRAL/GDF15 complex, which is also shown in Table 38. Table 45 illustrates that all core interaction interface amino acid residues on GFRAL that bind to GDF15 are also core interaction interface amino acids in the GFRAL/25M22 Fab interaction.

[0596] The amino acid sequence of a full-length precursor human GFRAL protein is shown below (see also Example 12, part C):

```
GERAL sequences
SEQ ID NO: 1797
                10 20 30 40
NIVFIFLAMG LSLENEYTSQ TNNCTYLREQ CLRDANGCKH
                50 60 70 80
AWRVMEDACN DSDPGDPCKM RNSSYCNLSI QYLVESNFQF
                90 100 110 120
KECLCTDDFY CTVNKLLGKK CINESDNVKE DKFKWNLTTR
              130 140 150 160
SHHGFKGMWS CLEVAEACVG DYVCNAQLAS YLKACSANGN
              170 180 190 200
PCDLKQCQAA IRFFYQNIPF NIAQMLAFCD CAQSDIPCQQ
              210 220 230 240
SKEALHSKTC AVNMVPPPTC LSVIRSCQND ELCRRHYRTF
              250 260 270 280
QSKCWQRVTR KCHEDENCIS TLSEQDLTCS GSDDCEAAYI
              290 300 310 320
DILGTVLQVQ CTCRTITQSE ESLKKIFQHM LHRESCFNYP
              330 340 350 360
TLSNVEGMAL YTRKHANKIT LTGFHSPFNG EVIYAAMCNT
              370 380 390
VTCGILLLVM VKLRTSRISS KARDPSSIQI 9GEL
```

TABLE 45

| Residues on GFRAL | Residues on GFRAL that | |
|---|---|---|
| that bind to GDF15 | bind to 25M22 | |
| Core interaction | Core interaction | Boundary interaction |
| interface amino | interface | interface |
| acids | amino acids | amino acids |
| LEU132 | LEU132 | SER130 |
| ALA135 | ALA135 | CYS131 |
| GLU136 | GLU136 | LEU132 |
| VAL139 | VAL139 | GLU133 |
| GLY140 | GLY140 | VAL134 |
| VAL142 | VAL142 | ALA135 |
| ASN145 | ASN145 | GLU136 |
| ALA146 | ALA146 | ALA137 |
| LEU148 | LEU148 | CYS138 |
| ALA149 | ALA149 | VAL139 |
| LEU152 | LEU152 | GLY140 |
| LYS153 | LYS153 | ASP141 |
| ILE196 | ILE196 | VAL142 |
| PRO197 | PRO197 | VAL143 |
| GLN200 | GLN200 | CYS144 |
| SER201 | SER201 | ASN145 |
| ALA204 | ALA204 | ALA146 |
| LEU205 | LEU205 | GLN147 |
| | | LEU148 |
| | | ALA149 |
| | | SER150 |
| | | TYR151 |
| | | LEU152 |
| | | LYS153 |
| | | ALA154 |
| | | CYS155 |
| | | SER156 |
| | | PHE174 |
| | | TYR175 |
| | | LEU186 |
| | | CYS189 |
| | | CYS191 |
| | | ALA192 |
| | | GLN193 |
| | | SER194 |
| | | ASP195 |
| | | ILE196 |
| | | PRO197 |
| | | CYS198 |
| | | GLN199 |
| | | GLN200 |
| | | SER201 |
| | | LYS202 |
| | | GLU203 |
| | | ALA204 |
| | | LEU205 |
| | | HIS206 |
| | | SER207 |

*GFRAL amino acid numbering according to SEQ ID NO: 1797

[0597] An analysis of the GFRAL epitope presented to 3P10 Fab in the 3P10 Fab::GFRAL::25M22 Fab complex crystal structure showed that 3P10's mechanism of action is that of a non-competitive GDF15 inhibitor and does not involve blocking GDF15-binding to GFRAL. Exemplary core interaction interface amino acids on the GFRAL protein and on the 3P10 Fab CDRs for the heavy and light chains are shown in FIG. 54.

[0598] FIGS. 55A-55B illustrate the interaction interface residues on GFRAL and 3P10 Fab as stick models (FIG. 55A) or a space-filled surface models (FIG. 55B).

[0599] FIGS. 56A-56B illustrates core (FIG. 56A) and boundary (FIG. 56B) interaction interface amino acids on GFRAL for 3P10 Fab binding (GFRAL structural 3P10 binding epitope) in a space-filled surface model.

[0600] FIG. 57 illustrates the partial overlap of GFRAL epitopes for 3P10 Fab and RET on GFRAL. Two side views of a GFRAL ribbon diagram are shown in the left and right panels of FIG. 57. Interaction interface amino acids residues on GFRAL for 3P10 Fab and RET binding are highlighted in a space-filled surface model.

[0601] FIG. 58 illustrates the overlap of GFRAL epitopes for 25M22 Fab and 25M22 Fab binding on GFRAL. Top and a bottom views of a GFRAL ribbon diagram are shown on the left (top view) and right (bottom view) panels of FIG. 58. Boundary interaction interface residues on GFRAL involved in 25M22 Fab and 25M22 Fab binding are shown as space-filled surface models.

[0602] GFRAL amino acids at the interface of the GFRAL/3P10 Fab complex are shown in Table 46. To compare the interaction interface amino acids in GFRAL/3P10 Fab and GFRAL/RET complexes, Table 446 further lists the GFRAL amino acids at the interface of the GFRAL/RET complex, which is also shown in Table 40A. Table 46 shows core interaction interface amino acid residues on GFRAL that bind to both RET and 3P10 Fab in bold.

TABLE 46
Residues on GFRAL

| that bind to RET in | Residues on GFRAL that bind to | |
|---|---|---|
| RET/GFRAL/GDF15 Model | 3P10 in 3P10/GFRAL structure | |
| Core interaction | Core interaction | Boundary interaction |
| interface | interface | interface |
| amino acids | amino acids | amino acids |
| Gln246 | MET214 | LEU164 |
| Arg247 | PRO216 | LYS208 |
| Arg250 | PRO217 | VAL212 |
| Lys251 | GLN290 | ASN213 |
| Cys252 | CYS291 | MET214 |
| Asp255 | THR292 | VAL215 |
| Glu256 | CYS293 | PRO216 |
| Asn257 | ARG294 | PRO217 |
| Cys258 | THR295 | PRO218 |
| Ile259 | ILE296 | THR219 |
| Ser260 | THR297 | CYS220 |
| Thr261 | GLN298 | LEU221 |
| Leu262 | SER299 | VAL223 |
| Thr297 | GLU301 | TRP245 |
| Gln298 | LYS305 | LEU267 |
| Ser299 | GLN308 | CYS269 |
| | HIS309 | GLN288 |
| | HIS312 | VAL289 |
| | SER315 | GLN290 |
| | | CYS291 |
| | | THR292 |
| | | CYS293 |
| | | ARG294 |
| | | THR295 |
| | | ILE296 |
| | | THR297 |
| | | GLN298 |
| | | SER299 |
| | | GLU300 |
| | | GLU301 |
| | | SER302 |
| | | LEU303 |
| | | CYS304 |
| | | LYS305 |
| | | ILE306 |
| | | PHE307 |
| | | GLN308 |
| | | HIS309 |
| | | MET310 |
| | | LEU311 |
| | | HIS312 |
| | | ARG313 |
| | | LYS314 |
| | | SER315 |
| | | CYS316 |
| | | PHE317 |

[0603] Core interaction interface amino acid residues on GFRAL that bind to both RET and 3P10 Fab are shown in bold.

### C1: Crystal Structure of GFRAL/8D8/5F12 Fab Complex

[0604] The crystal structure of a 8D8 Fab::GFRAL::5F12 Fab complex was determined.

[0605] 8D8 Fab and 5F12 Fab amino acid sequences are shown below, with VH and VL sequences bolded and CDR regions bolded and underlined.

8D8 Fab Hc:
(SEQ ID NO: 1828)
QVQLKESGPGLVAPSQSLSITCTVSGFSLSRYSVHWVRQPPGKGL
EWLGMIWGFGSTDYNSALKSRLSITKDNSKSQFFLKMNSLQTDDT
AMYYCARIHTTAGSYWGQGTLVTVSAASTKGPSVFPLAPSSKSTS
GGTAALGCLVKDYFPEPVTVSWNSGALTSGVHTFPAVLQSSGLYS
LSSVVTVPSSSLGTQTYICNVNHKPSNTKVDKKVEPKSCDEVDG
8D8 Fab Lc:
(SEQ ID NO: 1829)
DIVMTQSQKFMSTSIGDRVSVTCKASQNVGTNVAWYQQKPGQSPK
ALVYSTSYRYSGVPDRFTGSGSGTDFTLTISNVQSEDLAEYFCHQ
YNSYPLTFGAGTKLELKRTVAAPSVFIFPPSDEQLKSGTASVVCL
LNNFYPREAKVQWKVDNALQSGNSQESVTEQDSKDSTYSLSSTLT
LSKADYEKHKVYACEVTHQGLSSPVTKSFNRGEC
5F12 Fab Hc:
(SEQ ID NO: 1830)
QVQLKQSGTELVRPGASVKLSCKASGYTFTDYYINWVKQRPGQGL
EWIARIYPGNGNTYHNEKFKGKATLTAEKSSSTAYMQLSSLTSED
SAVYFCAREGLYYDYDRYFDYWGQGTALTVSSASTKGPSVFPLAP
SSKSTSGGTAALGCLVKDYFPEPVTVSWNSGALTSGVHTFPAVLQ
SSGLYSLSSVVTVPSSSLGTQTYICNVNHKPSNTKVDKKVEPKSC
DEVDG
5F12 Fab Lc:
(SEQ ID NO: 1831)
NIVLTQSPASLAVSLGQRATISCRASESVDTYGNSFMHWYQQKPG
QPPKLLIYLASNLESGVPARFSGSGSRTDFTLTIDPVEADDAATY
YCHQNNEDPPAFGGGTKLEIKRTVAAPSVFIFPPSDEQLKSGTAS
VVCLLNNFYPREAKVQWKVDNALQSGNSQESVTEQDSKDSTYSLS
STLTLSKADYEKHKVYACEVTHQGLSSPVTKSFNRGEC

[0606] FIG. 59 illustrates an aspect of a 3P10 Fab::GFRAL::25M22 Fab complex by a ribbon diagram. The Fab fragments interact with an asymmetric unit of GFRAL in the 3P10 Fab::GFRAL::25M22 Fab complex crystal. The crystal structure also showed that GFRAL epitope residues 290-312 were presented to the 3P10 antibody and GFRAL N-terminal epitope residues 130-157 were presented to the 25M22 antibody heavy chain CDR regions

[0607] FIG. 60 illustrates 8D8 Fab and 5F12 Fab binding sites on the GFRAL protein. Residues on the GFRAL protein that are important for Fab bindings are shown as stick models.

[0608] An analysis of the GFRAL epitope presented to 8D8 Fab in the 8D8 Fab::GFRAL::5F12 Fab complex crystal structure showed that 8D8's mechanism of action is that of a competitive GDF15 inhibitor and involves blocking GDF15 binding to GFRAL. Exemplary core interaction interface amino acids on the GFRAL protein and on the 8D8 Fab CDRs for the heavy and light chains are shown in FIG. 61.

[0609] FIGS. 62A, 62B, 62C and 62D illustrate the core and boundary amino acid residues in the GFRAL/8D8 Fab interaction interface. FIG. 62A illustrates the structure of GFRAL with the core 8D8 interaction interface amino acids (GFRAL epitope residues) on GFRAL highlighted in a space-filled surface model. FIG. 62B also illustrates the core interface amino acids on GFRAL covered by 8D8 in a space-filled surface model. FIG. 62C illustrates the structure of GFRAL in a ribbon diagram with boundary 8D8 Fab interaction interface amino acids on GFRAL (GFRAL epitope residues) highlighted in a space-filled surface model. FIG. 62D also illustrates the boundary interface amino acids on GFRAL covered by 8D8 in a space-filled surface model.

[0610] FIGS. 63A, 63B, 63C and 63D illustrate the core and boundary amino acid residues in the GFRAL/5F12 Fab interaction interface. FIG. 63A illustrates the structure of GFRAL with the core 5F12 interaction interface amino acids (GFRAL epitope residues) on GFRAL highlighted in a space-filled surface model. FIG. 63B also illustrates the core interface amino acids on GFRAL covered by 5F12 in a space-filled surface model. FIG. 63C illustrates the structure of GFRAL in a ribbon diagram with boundary 5F12 Fab interaction interface amino acids on GFRAL (GFRAL epitope residues) highlighted in a space-filled surface model. FIG. 63D also illustrates the boundary interface amino acids on GFRAL covered by 5F12 in a space-filled surface model.

[0611] GFRAL amino acids at the interface of the GFRAL/8D8 Fab complex are shown in Table 47. To compare the interaction interface amino acids in GFRAL/8D8 Fab and GFRAL/GDF15 complexes, Table 47 further lists the GFRAL amino acids at the interface of the GFRAL/GDF15 complex, which is also shown in Table 38. Table 47 illustrates that core interaction interface amino acid residues on GFRAL that bind to GDF15 overlaps with the core interaction interface amino acids in the GFRAL/8D8 Fab interaction.

[0612] The amino acid sequence of a full-length precursor human GFRAL protein is shown below (see also Example 12, part C):

```
GERAL sequences
SEQ ID NO: 1797
                10 20 30 40
NIVFIFLAMG LSLENEYTSQ TNNCTYLREQ CLRDANGCKH
                50 60 70 80
AWRVMEDACN DSDPGDPCKM RNSSYCNLSI QYLVESNFQF
                90 100 110 120
KECLCTDDFY CTVNKLLGKK CINESDNVKE DKFKWNLTTR
              130 140 150 160
SHHGFKGMWS CLEVAEACVG DYVCNAQLAS YLKACSANGN
              170 180 190 200
PCDLKQCQAA IRFFYQNIPF NIAQMLAFCD CAQSDIPCQQ
              210 220 230 240
SKEALHSKTC AVNMVPPPTC LSVIRSCQND ELCRRHYRTF
              250 260 270 280
QSKCWQRVTR KCHEDENCIS TLSEQDLTCS GSDDCEAAYI
              290 300 310 320
DILGTVLQVQ CTCRTITQSE ESLKKIFQHM LHRESCFNYP
              330 340 350 360
TLSNVEGMAL YTRKHANKIT LTGFHSPFNG EVIYAAMCNT
              370 380 390
VTCGILLLVM VKLRTSRISS KARDPSSIQI 9GEL
```

TABLE 47

| | |
|---|---|
| residues on GFRAL | Residues on GFRAL that bind to 8D8 in |
| that bind to GDF15 | in GFRAL/8D8 Fab structure |

| Core interaction | Core interaction | Boundary interaction |
|---|---|---|
| interface | interface | interface |
| amino acids | amino acids | amino acids |
| LEU132 | Glu136 | LEU132 |
| ALA135 | Ala137 | GLU133 |
| GLU136 | Val139 | VAL134 |
| VAL139 | Gly140 | ALA135 |
| GLY140 | Asp141 | GLU136 |
| VAL142 | Val142 | ALA137 |
| ASN145 | Val143 | CYS138 |
| ALA146 | Cys144 | VAL139 |
| LEU148 | Asn145 | GLY140 |
| ALA149 | Ala146 | ASP141 |
| LEU152 | Gln147 | VAL142 |
| LYS153 | Phe173 | VAL143 |
| ILE196 | Asn177 | CYS144 |
| PRO197 | Ile178 | ASN145 |
| GLN200 | Pro179 | ALA146 |
| SER201 | Asn181 | GLN147 |
| ALA204 | Ile182 | LEU148 |
| LEU205 | Met185 | ALA149 |
| | | SER150 |
| | | TYR151 |
| | | PHE174 |
| | | TYR175 |
| | | ALA169 |
| | | ALA170 |
| | | ILE171 |
| | | ARG172 |
| | | PHE173 |
| | | GLN176 |
| | | ASN177 |
| | | ILE178 |
| | | PRO179 |
| | | PHE180 |
| | | ASN181 |
| | | ILE182 |
| | | ALA183 |
| | | GLN184 |
| | | MET185 |
| | | LEU186 |
| | | ALA187 |
| | | PHE188 |
| | | CYS189 |

Core interaction interface amino acid residues on GFRAL that bind to both GDF15 and 8D8 Fab are shown in bold.

[0613] An analysis of the GFRAL epitope presented to 5F12 Fab in the 5F12 Fab::GFRAL::8D8 Fab complex crystal structure showed that 5F12's mechanism of action is that of a non-competitive GDF15 inhibitor and does not involve blocking GDF15-binding to GFRAL. Exemplary core interaction interface amino acids on the GFRAL protein and on the 5F12 Fab CDRs for the heavy and light chains are shown in FIG. 64.

[0614] GFRAL amino acids at the interface of the GFRAL/5F12 Fab complex are shown in Table 48. To compare the interaction interface amino acids in GFRAL/5F12 Fab and GFRAL/RET complexes, Table 48 further lists the GFRAL amino acids at the interface of the GFRAL/RET complex, which is also shown in Table 40A. Table 48 shows core interaction interface amino acid residues on GFRAL that bind to both RET and 5F12 Fab. Residues on GFRAL which are critical for GFRAL/5F12 interactions: 5F12 binding epitope on GFRAL reveals a non-competitive inhibitory mechanism of action of blocking GFRAL/RET interactions.

TABLE 48

| residues on GFRAL | residues on GFRAL that | |
|---|---|---|
| that bind to RET in | bind to 5F12 in | |
| RET/GFRAL/GDF15 Model | 5F12/GFRAL structure | |
| Core interaction | Core interaction | Boundary interaction |
| interface amino | interface | interface |
| acids on GFRAL | amino acids | amino acids |
| Gln246 | Arg234 | CYS233 |
| Arg247 | Arg238 | ARG234 |
| Arg250 | GLN241 | ARG235 |
| Lys251 | Ser242 | HIS236 |
| Cys252 | Lys243 | TYR237 |
| Asp255 | Trp245 | ARG238 |
| Glu256 | Gln246 | THR239 |
| Asn257 | Thr249 | PHE240 |
| Cys258 | Arg250 | GLN241 |
| Ile259 | Lys251 | SER242 |
| Ser260 | Cys252 | LYS243 |
| Thr261 | His253 | CYS244 |
| Leu262 | Asp255 | TRP245 |
| Thr297 | Asn257 | GLN246 |
| Gln298 | Cys258 | ARG247 |
| Ser299 | Ser260 | VAL248 |
| | Thr261 | THR249 |
| | Leu262 | ARG250 |
| | | LYS251 |
| | | CYS252 |
| | | HIS253 |
| | | GLU254 |
| | | ASP255 |
| | | GLU256 |
| | | ASN257 |
| | | CYS258 |
| | | ILE259 |
| | | SER260 |
| | | THR261 |
| | | LEU262 |
| | | SER263 |
| | | LYS264 |
| | | ASP266 |
| | | LEU267 |
| | | THR268 |
| | | SER272 |
| | | ASP274 |
| | | CYS275 |
| | | ALA278 |
| | | CYS269 |
| | | SER270 |
| | | SER302 |
| | | LEU303 |
| | | ILE306 |
| | | HIS309 |
| | | LEU311 |
| | | MET310 |
| | | SER315 |
| | | CYS316 |

Core interaction interface amino acid residues on GFRAL that bind to both RET and 5F12 Fab are shown in bold.

[0615] The contents of all references described herein are hereby incorporated by reference.

[0616] Other embodiments are within the following claims.

Lengthy table referenced here
US20250188174A1-20250612-T00001
Please refer to the end of the specification for access instructions.

Lengthy table referenced here
US20250188174A1-20250612-T00002
Please refer to the end of the specification for access instructions.

Lengthy table referenced here
US20250188174A1-20250612-T00003
Please refer to the end of the specification for access instructions.

LENGTHY TABLES
The patent application contains a lengthy table section. A copy of the table is available in electronic form from the USPTO web site (https://seqdata.uspto.gov/?pageRequest=docDetail&DocID=US20250188174A1). An electronic copy of the table will also be available from the USPTO upon request and payment of the fee set forth in 37 CFR 1.19(b)(3).

The application's sequence listing, which the Patent Office published only in electronic form, follows.

SEQUENCE LISTING (2008 sequences)

SEQ ID NO: 1 - protein, 121 aa, synthetic construct
QMQLKQSGPGLVQPSQSLSITCTVSGFSLNDYGVHWIRQSPGKGLEWLGVIWSGGRTDYNAAFISRLSISKDNSKSQVFFKMSSLQPQDTAIYYCARWALYFLYGGSMDYWGQGTSVTVSS

SEQ ID NO: 2 - protein, 113 aa, synthetic construct
DVVLTQTPLSLPVSPGDQASISCRSSQSLVHSSGITYLHWYLQKPGQSPKLLIYKLSNRFSGVPDRFSGSGSGTDFTLKISRVEAEDLGVYFCSQSTHVPPWTFGGGTKLEIK

SEQ ID NO: 3 - protein, 118 aa, synthetic construct
QIQLVQSGPELKKPGETVKISCKASGYTFTDYGVIWVKQAPGKALKWMGWINTYTGEPTYADDLKGRFAFSLETSASSASLQINNLKNEDTATYFCARRYGPEDIDYWGQGTTLTVSS

SEQ ID NO: 4 - protein, 111 aa, synthetic construct
DIVLTQSPVSLAVSLGQRATISCRASESVDNYGISFMSWFQQKPGQPPKLLIYAASHQGSGVPARFSGSGSGTDFSLNIHPMEEDDSAMYFCLQSKEVPWTFGGGTKLEIK

SEQ ID NO: 5 - protein, 114 aa, synthetic construct
QIQLVQSGPELKKPGETVKISCKASGYPFTIYGMNWVEQAPGKGLKWMGWINTYSGVPTYADDFKGRFAFSLETSASTAYLQINNLKDEDTATYFCASATGNYWGQGTTLTVSS

SEQ ID NO: 6 - protein, 107 aa, synthetic construct
DIQMTQSPSSLSASLGERVSLTCRASQDIGSSLNWLQQEPDGTIKRLIYATSSLDSGVPKRFSGSRSGSDYSLTISSLESEDFVDYYCLQYASSPYTFGGGTKVEIK

SEQ ID NO: 7 - protein, 122 aa, synthetic construct
QVQLKQSGTELVRPGASVKLSCKASGYTFTDYYINWVKQRPGQGLEWIARIYPGNGNTYHNEKFKGKATLTAEKSSSTAYMQLSSLTSEDSAVYFCAREGLYYDYDRYFDYWGQGTALTVSS

SEQ ID NO: 8 - protein, 111 aa, synthetic construct
NIVLTQSPASLAVSLGQRATISCRASESVDTYGNSFMHWYQQKPGQPPKLLIYLASNLESGVPARFSGSGSRTDFTLTIDPVEADDAATYYCHQNNEDPPAFGGGTKLEIK

SEQ ID NO: 9 - protein, 118 aa, synthetic construct
QVQLQQSGPELMKPGASVILSCKAIGYTFTDYWIEWVKERPGHGLEWIGEILLGSDSIHFNEKFKGKATISADTSSNTAYMQLSSLTTEDSAIYYCVRQDWNWYFDVWGTGTTVTVSS

SEQ ID NO: 10 - protein, 112 aa, synthetic construct
DVVMTQTPLTLSVTIGHPASISCKSSQSLLDFDGKTYLNWLFQRPGQSPKRLFYLVSKLDSGVPDRFTGSGSGTDFTLKISRVEAEDLGVYYCWQGTHFPRTFGGGTKLEIK

SEQ ID NO: 11 - protein, 116 aa, synthetic construct
QVQLKESGPGLVAPSQSLSITCTVSGFSLSRYSVHWVRQPPGKGLEWLGMIWGFGSTDYNSALKSRLSITKDNSKSQFFLKMNSLQTDDTAMYYCARIHTTAGSYWGQGTLVTVSA

SEQ ID NO: 12 - protein, 107 aa, synthetic construct
DIVMTQSQKFMSTSIGDRVSVTCKASQNVGTNVAWYQQKPGQSPKALVYSTSYRYSGVPDRFTGSGSGTDFTLTISNVQSEDLAEYFCHQYNSYPLTFGAGTKLELK

SEQ ID NO: 13 - protein, 118 aa, synthetic construct
QVQLQQSGAELAKPGASVKMSCKTSGYTFTDYWIHWVKQRPGQGLEWIGYINPNSNYAEYNQKFKVKATLTADKSSSTAYLQLSRLTSEDSAVYYCARFDWNWYFHVWGAGSTVTVSS

SEQ ID NO: 14 - protein, 112 aa, synthetic construct
DVALTQIPLTLSVTVGQPASISCKSSQSLSDSDGKTYLNWLLQKPGQSPKRLIYLVSRLGSGVPDRFTGSGSGADFTLKISRVEAEDLGVYYCWQGTHFPQTFGGGTKLEIK

SEQ ID NO: 15 - protein, 125 aa, synthetic construct
QVQLQQSGPDLVKPGASVKISCKASGYTFTSYWVNWMKQRPGKGLEWIGRIYPGDGDTNYNGKFKGKATLTADKSSSTAYMQLSSLTSEDSAVYFCARAYLLRLRRTGYYAMDYWGQGTSVTVSS

SEQ ID NO: 16 - protein, 112 aa, synthetic construct
DVVLTQTPLSLPVNIGDQASISCKSTKSLLNSDEFTYLDWYLQKPGQSPQLLIFLVSNRFSGVPDRFSGSGSGTDFTLKISRVEAEDLGVYYCFQSNYLPYTFGGGTKLEIK

SEQ ID NO: 17 - protein, 121 aa, synthetic construct
QIQLVQSGPELKKPGETVKISCKASGYTFTTYGMSWVKQAPGKIFKWMGWINTYSGVPTFVDDFRGRFAFSLETSASTAYLQIGNLKNEDTATYFCARRSSYYPYWYFDVWGTGTTVTVSS

SEQ ID NO: 18 - protein, 107 aa, synthetic construct
DIQMTQSPASLSASVGETVTITCRPSENIYSYLTWFQQEQGKSPQLLVYNAQTLAEGVPSRFSGSGSGTHFSLKINSLQPEDFGTYYCQHYYGYPFTFGSGTKLEIK

SEQ ID NO: 19 - protein, 114 aa, synthetic construct
QNQLVQSGPELKKPGEIVKISCKTSGYTFTDYSMHWVKKTPGKGFKWMGWINTETGEPTYADDFKGRFAFSLETSANTAHLQITNLKNEDTATYFCVKGTLNYWGQGTTLTVSS

SEQ ID NO: 20 - protein, 107 aa, synthetic construct
DIKMTQSPSSMYASLGERVTITCKASQDIKSYLNWFQQKPGKSPKTLIYRTKRLVDGVPSRFSGSGSGQDYSLTVSSLEYDDVGIYYCLQYVEFPLTFGDGTKLELK

SEQ ID NO: 21 - protein, 120 aa, synthetic construct
QAQLQQSGAELVKPGASVKLSCKASGYSFTSYNIDWVRQRPEQGLEWIGWIFPGDGSTKYNEKFKGQATLTTDKSSSTTYIHLSRLTSEDSAVYFCARSGIYYGSHFVYWGQGTLVTVSA

SEQ ID NO: 22 - protein, 112 aa, synthetic construct
DVVMTQTPLTLSVTIGQSASISCRSSQSLLDSDGKTYLNWLLQRPGQSPKRLIYLVSKVDSGVPDRFTGSGSGTDFTLKISRVEAEDLGVYFCWQGTHFPLTFGAGTKLELK

SEQ ID NO: 23 - protein, 120 aa, synthetic construct
QVQLQQSGSELVKPGTSMKLSCKASGYTFTSYNINWVRLRPEQGLEWIGWIFPGDDSIKYNENFRGKATLTTDKSSSTAYMHLSRLTSDDSAVYFCARSGIFYGNNFAYWGQGTLVTVSA

SEQ ID NO: 24 - protein, 112 aa, synthetic construct
DVVMTQAPLILSVTIGQPASISCKSSQSLLDGDGETYLSWLLQRPGQSPKRLIYLVSKLDSGVPDRFTGSGSGTDFTLKISRVEAEDLGVYYCCQSTHFPLTFGAGTKLELK

SEQ ID NO: 25 - protein, 119 aa, synthetic construct
QVHLQQPGAELVKPGASVKLSCKASGFTFTGYNINWVRLRPEQGLEWIGWIFPGDDNAKYNEKFKGKATLTTDKSSNTAYMQLSRLTSEDSAVYFCARTPVLSNYFDYWGQGTTLTVSS

SEQ ID NO: 26 - protein, 106 aa, synthetic construct
DIQMTQSPSSLSASLGGKVTITCKASQDISKYISWYQHKPGKSPRLLIHYTSTLQPGIPSRFSGSGSGRDYSFSISNLEPEDIATYYCLQYDNLYTFGGGTKLEIK

SEQ ID NO: 27 - protein, 125 aa, synthetic construct
QVQLQQSGPDLVKPGASVKISCKASGYAFTSYWMNWVKQRPGKGLEWIGRIYPGDGDTNYNGKFKGKATLTADKSSSTAYMQLSSLTSEDSAVYFCARAYLLRLRRTGYYAMDYWGQGTSVTVSS

SEQ ID NO: 28 - protein, 112 aa, synthetic construct
DVVLTQTPLSLPVNIGDQASISCKSTKSLLNSDEFTYLDWYLQKPGQSPQLLIYLVSNRFSGVPDRFSGSGSGTDFTLKISRVEAEDLGVYYCFQSNYLPYTFGGGTKLEIK

SEQ ID NO: 29 - protein, 118 aa, synthetic construct
EVKLVESGGGLVQPGGSLKLSCAASGFTFSDYFMFWVRQTPEKRLEWVAYISNDGDSTYYPDTVQGRFTISRDNAKNTLYLQMSRLRSEDTAMYYCTRQGAQATLDYWGQGTTLTVSS

SEQ ID NO: 30 - protein, 103 aa, synthetic construct
QIVLTQSPAIMSASLGEEITLTCSASSSVFYMHWYQQKSGTSPKLLIYSTSNLASGIPSRFSGSGSGTFYSLTISSVEAEDAADYYCHQWSSTFGGGTKLEIK

SEQ ID NO: 31 - protein, 122 aa, synthetic construct
QVQLQQSGVELARPGAAVKLSCKASGYTFANYGLTWVKQRTGQGLEWIGEIYPGSGHTHYNEDFKGKATLTADRSSSTAYMELRSLTSEDSAVYFCARRIQLLLPVGGFVYWGQGTLVTVSA

SEQ ID NO: 32 - protein, 107 aa, synthetic construct
DFVLTQSPATLSVTPGDSVSLSCRASQSISNNLHWYQQKSHESPRLLIKYASQSISGIPSRFSGSGSGTDFTLSINSVETEDFGVYFCQQSNSWPHTFGGGTKLEIK

SEQ ID NO: 33 - protein, 119 aa, synthetic construct
EVKLVESGGGLVKPGGSLKLSCAASGFTFSTYAMSWVRQTPEKRLEWVASITSGGTTYYTDSVKGRFTISRDNARNILYLQMSSLRSEDTAMYYCARDGNFYYYGMDYWGQGTSVTVSS

SEQ ID NO: 34 - protein, 106 aa, synthetic construct
DIVMTQSQKFMSTSVGDRVSITCKASQNVGTAVAWYQQKPGQSPKILIYSASNRFTGVPDRFTGSGSGTDFTLTISNMQSEDLADYFCQQYSSYFTFGGGTKLELK

SEQ ID NO: 35 - protein, 120 aa, synthetic construct
QVQLQQSGAELLKPGASVKLSCKASGYTFTTYWMHWVKQRPGQGLEWIGMIHPNSGSSNYNEKFKNKATLTVDKSSSTAYMQLSSLTSEDSAVYFCARSDYGFIPYFDYWGQGTTLTVSS

SEQ ID NO: 36 - protein, 108 aa, synthetic construct
DILLTQSPAILSVSPGERVSFSCRASQSIGTSIHWYQQRTNGSPRLLIKYASESISGIPSRFSGSGSGTDFTLIINSVESEDIADYYCQQSNSWPTFTFGAGTKLELK

SEQ ID NO: 37 - protein, 120 aa, synthetic construct
QVQLHQPGAELVKPGASVKLSCKTSGYTFTSYWMQWVKQRPGQGLEWIGEIDPSDSYTNYNQKFKGKATLTVDTSSTTAYMQLSSLTSEDSAVYYCARPLDRSAYYFDYWGQGTTLTVSS

SEQ ID NO: 38 - protein, 111 aa, synthetic construct
DIVLTQSPASLAVSLGQRATISCRASESVDFSGNSFMHWYQQKPGQPPKLLIYRASNLDSGIPARFSGVGSRTDFTLTINPVEADDVATYYCQQSNEDPYTFGGGTKLEIE

SEQ ID NO: 39 - protein, 119 aa, synthetic construct
DVQLQESGPGLVKPSQSLSLTCSVTGYSITSGYYWNWIRQFPGNKLEWMGHIANDGSNYYNPFLKHRVSITRDTSKNQFFLKLNSVTIQDTATYYCARGGSYFDYVDYWGQGTTLTVSS

SEQ ID NO: 40 - protein, 107 aa, synthetic construct
DIQMTQTTSSLSASLGDRVTINCRASQDISNYLNWYQQKPDGTVKLLIYYTSRLHSGVPSRFSGSGSGTDYSLTITNLEQEDIATYFCQQGNTLPFTFGSGTKLEIK

SEQ ID NO: 41 - protein, 10 aa, synthetic construct
GFSLNDYGVH

SEQ ID NO: 42 - protein, 8 aa, synthetic construct
GFSLNDYG

SEQ ID NO: 43 - protein, 5 aa, synthetic construct
DYGVH

SEQ ID NO: 44 - protein, 7 aa, synthetic construct
GFSLNDY

SEQ ID NO: 45 - protein, 6 aa, synthetic construct
NDYGVH

SEQ ID NO: 46 - protein, 10 aa, synthetic construct
GYTFTDYGVI

SEQ ID NO: 47 - protein, 8 aa, synthetic construct
GYTFTDYG

SEQ ID NO: 48 - protein, 5 aa, synthetic construct
DYGVI

SEQ ID NO: 49 - protein, 7 aa, synthetic construct
GYTFTDY

SEQ ID NO: 50 - protein, 6 aa, synthetic construct
TDYGVI

SEQ ID NO: 51 - protein, 10 aa, synthetic construct
GYPFTIYGMN

SEQ ID NO: 52 - protein, 8 aa, synthetic construct
GYPFTIYG

SEQ ID NO: 53 - protein, 5 aa, synthetic construct
IYGMN

SEQ ID NO: 54 - protein, 7 aa, synthetic construct
GYPFTIY

SEQ ID NO: 55 - protein, 6 aa, synthetic construct
TIYGMN

SEQ ID NO: 56 - protein, 10 aa, synthetic construct
GYTFTDYYIN

SEQ ID NO: 57 - protein, 8 aa, synthetic construct
GYTFTDYY

SEQ ID NO: 58 - protein, 5 aa, synthetic construct
DYYIN

SEQ ID NO: 59 - protein, 6 aa, synthetic construct
TDYYIN

SEQ ID NO: 60 - protein, 10 aa, synthetic construct
GYTFTDYWIE

SEQ ID NO: 61 - protein, 8 aa, synthetic construct
GYTFTDYW

SEQ ID NO: 62 - protein, 5 aa, synthetic construct
DYWIE

SEQ ID NO: 63 - protein, 6 aa, synthetic construct
TDYWIE

SEQ ID NO: 64 - protein, 10 aa, synthetic construct
GFSLSRYSVH

SEQ ID NO: 65 - protein, 8 aa, synthetic construct
GFSLSRYS

SEQ ID NO: 66 - protein, 5 aa, synthetic construct
RYSVH

SEQ ID NO: 67 - protein, 7 aa, synthetic construct
GFSLSRY

SEQ ID NO: 68 - protein, 6 aa, synthetic construct
SRYSVH

SEQ ID NO: 69 - protein, 10 aa, synthetic construct
GYTFTDYWIH

SEQ ID NO: 70 - protein, 5 aa, synthetic construct
DYWIH

SEQ ID NO: 71 - protein, 6 aa, synthetic construct
TDYWIH

SEQ ID NO: 72 - protein, 10 aa, synthetic construct
GYTFTSYWVN

SEQ ID NO: 73 - protein, 8 aa, synthetic construct
GYTFTSYW

SEQ ID NO: 74 - protein, 5 aa, synthetic construct
SYWVN

SEQ ID NO: 75 - protein, 7 aa, synthetic construct
GYTFTSY

SEQ ID NO: 76 - protein, 6 aa, synthetic construct
TSYWVN

SEQ ID NO: 77 - protein, 10 aa, synthetic construct
GYTFTTYGMS

SEQ ID NO: 78 - protein, 8 aa, synthetic construct
GYTFTTYG

SEQ ID NO: 79 - protein, 5 aa, synthetic construct
TYGMS

SEQ ID NO: 80 - protein, 7 aa, synthetic construct
GYTFTTY

SEQ ID NO: 81 - protein, 6 aa, synthetic construct
TTYGMS

SEQ ID NO: 82 - protein, 10 aa, synthetic construct
GYTFTDYSMH

SEQ ID NO: 83 - protein, 8 aa, synthetic construct
GYTFTDYS

SEQ ID NO: 84 - protein, 5 aa, synthetic construct
DYSMH

SEQ ID NO: 85 - protein, 6 aa, synthetic construct
TDYSMH

SEQ ID NO: 86 - protein, 10 aa, synthetic construct
GYSFTSYNID

SEQ ID NO: 87 - protein, 8 aa, synthetic construct
GYSFTSYN

SEQ ID NO: 88 - protein, 5 aa, synthetic construct
SYNID

SEQ ID NO: 89 - protein, 7 aa, synthetic construct
GYSFTSY

SEQ ID NO: 90 - protein, 6 aa, synthetic construct
TSYNID

SEQ ID NO: 91 - protein, 10 aa, synthetic construct
GYTFTSYNIN

SEQ ID NO: 92 - protein, 8 aa, synthetic construct
GYTFTSYN

SEQ ID NO: 93 - protein, 5 aa, synthetic construct
SYNIN

SEQ ID NO: 94 - protein, 6 aa, synthetic construct
TSYNIN

SEQ ID NO: 95 - protein, 10 aa, synthetic construct
GFTFTGYNIN

SEQ ID NO: 96 - protein, 8 aa, synthetic construct
GFTFTGYN

SEQ ID NO: 97 - protein, 5 aa, synthetic construct
GYNIN

SEQ ID NO: 98 - protein, 7 aa, synthetic construct
GFTFTGY

SEQ ID NO: 99 - protein, 6 aa, synthetic construct
TGYNIN

SEQ ID NO: 100 - protein, 10 aa, synthetic construct
GYAFTSYWMN

SEQ ID NO: 101 - protein, 8 aa, synthetic construct
GYAFTSYW

SEQ ID NO: 102 - protein, 5 aa, synthetic construct
SYWMN

SEQ ID NO: 103 - protein, 7 aa, synthetic construct
GYAFTSY

SEQ ID NO: 104 - protein, 6 aa, synthetic construct
TSYWMN

SEQ ID NO: 105 - protein, 10 aa, synthetic construct
GFTFSDYFMF

SEQ ID NO: 106 - protein, 8 aa, synthetic construct
GFTFSDYF

SEQ ID NO: 107 - protein, 5 aa, synthetic construct
DYFMF

SEQ ID NO: 108 - protein, 7 aa, synthetic construct
GFTFSDY

SEQ ID NO: 109 - protein, 6 aa, synthetic construct
SDYFMF

SEQ ID NO: 110 - protein, 10 aa, synthetic construct
GYTFANYGLT

SEQ ID NO: 111 - protein, 8 aa, synthetic construct
GYTFANYG

SEQ ID NO: 112 - protein, 5 aa, synthetic construct
NYGLT

SEQ ID NO: 113 - protein, 7 aa, synthetic construct
GYTFANY

SEQ ID NO: 114 - protein, 6 aa, synthetic construct
ANYGLT

SEQ ID NO: 115 - protein, 10 aa, synthetic construct
GFTFSTYAMS

SEQ ID NO: 116 - protein, 8 aa, synthetic construct
GFTFSTYA

SEQ ID NO: 117 - protein, 5 aa, synthetic construct
TYAMS

SEQ ID NO: 118 - protein, 7 aa, synthetic construct
GFTFSTY

SEQ ID NO: 119 - protein, 6 aa, synthetic construct
STYAMS

SEQ ID NO: 120 - protein, 10 aa, synthetic construct
GYTFTTYWMH

SEQ ID NO: 121 - protein, 8 aa, synthetic construct
GYTFTTYW

SEQ ID NO: 122 - protein, 5 aa, synthetic construct
TYWMH

SEQ ID NO: 123 - protein, 6 aa, synthetic construct
TTYWMH

SEQ ID NO: 124 - protein, 10 aa, synthetic construct
GYTFTSYWMQ

SEQ ID NO: 125 - protein, 5 aa, synthetic construct
SYWMQ

SEQ ID NO: 126 - protein, 6 aa, synthetic construct
TSYWMQ

SEQ ID NO: 127 - protein, 11 aa, synthetic construct
GYSITSGYYWN

SEQ ID NO: 128 - protein, 9 aa, synthetic construct
GYSITSGYY

SEQ ID NO: 129 - protein, 6 aa, synthetic construct
SGYYWN

SEQ ID NO: 130 - protein, 8 aa, synthetic construct
GYSITSGY

SEQ ID NO: 131 - protein, 7 aa, synthetic construct
TSGYYWN

SEQ ID NO: 132 - protein, 16 aa, synthetic construct
VIWSGGRTDYNAAFIS

SEQ ID NO: 133 - protein, 7 aa, synthetic construct
IWSGGRT

SEQ ID NO: 134 - skipped

SEQ ID NO: 135 - protein, 12 aa, synthetic construct
WLGVIWSGGRTD

SEQ ID NO: 136 - protein, 9 aa, synthetic construct
VIWSGGRTD

SEQ ID NO: 137 - protein, 17 aa, synthetic construct
WINTYTGEPTYADDLKG

SEQ ID NO: 138 - protein, 8 aa, synthetic construct
INTYTGEP

SEQ ID NO: 139 - protein, 4 aa, synthetic construct
TYTG

SEQ ID NO: 140 - protein, 13 aa, synthetic construct
WMGWINTYTGEPT

SEQ ID NO: 141 - protein, 10 aa, synthetic construct
WINTYTGEPT

SEQ ID NO: 142 - protein, 17 aa, synthetic construct
WINTYSGVPTYADDFKG

SEQ ID NO: 143 - protein, 8 aa, synthetic construct
INTYSGVP

SEQ ID NO: 144 - protein, 4 aa, synthetic construct
TYSG

SEQ ID NO: 145 - protein, 13 aa, synthetic construct
WMGWINTYSGVPT

SEQ ID NO: 146 - protein, 10 aa, synthetic construct
WINTYSGVPT

SEQ ID NO: 147 - protein, 17 aa, synthetic construct
RIYPGNGNTYHNEKFKG

SEQ ID NO: 148 - protein, 8 aa, synthetic construct
IYPGNGNT

SEQ ID NO: 149 - protein, 4 aa, synthetic construct
PGNG

SEQ ID NO: 150 - protein, 13 aa, synthetic construct
WIARIYPGNGNTY

SEQ ID NO: 151 - protein, 10 aa, synthetic construct
RIYPGNGNTY

SEQ ID NO: 152 - protein, 17 aa, synthetic construct
EILLGSDSIHFNEKFKG

SEQ ID NO: 153 - protein, 8 aa, synthetic construct
ILLGSDSI

SEQ ID NO: 154 - protein, 4 aa, synthetic construct
LGSD

SEQ ID NO: 155 - protein, 13 aa, synthetic construct
WIGEILLGSDSIH

SEQ ID NO: 156 - protein, 10 aa, synthetic construct
EILLGSDSIH

SEQ ID NO: 157 - protein, 16 aa, synthetic construct
MIWGFGSTDYNSALKS

SEQ ID NO: 158 - skipped

SEQ ID NO: 159 - protein, 12 aa, synthetic construct
WLGMIWGFGSTD

SEQ ID NO: 160 - protein, 9 aa, synthetic construct
MIWGFGSTD

SEQ ID NO: 161 - protein, 17 aa, synthetic construct
YINPNSNYAEYNQKFKV

SEQ ID NO: 162 - protein, 8 aa, synthetic construct
INPNSNYA

SEQ ID NO: 163 - protein, 4 aa, synthetic construct
PNSN

SEQ ID NO: 164 - protein, 13 aa, synthetic construct
WIGYINPNSNYAE

SEQ ID NO: 165 - protein, 10 aa, synthetic construct
YINPNSNYAE

SEQ ID NO: 166 - protein, 17 aa, synthetic construct
RIYPGDGDTNYNGKFKG

SEQ ID NO: 167 - protein, 8 aa, synthetic construct
IYPGDGDT

SEQ ID NO: 168 - protein, 4 aa, synthetic construct
PGDG

SEQ ID NO: 169 - protein, 13 aa, synthetic construct
WIGRIYPGDGDTN

SEQ ID NO: 170 - protein, 10 aa, synthetic construct
RIYPGDGDTN

SEQ ID NO: 171 - protein, 17 aa, synthetic construct
WINTYSGVPTFVDDFRG

SEQ ID NO: 172 - protein, 17 aa, synthetic construct
WINTETGEPTYADDFKG

SEQ ID NO: 173 - protein, 8 aa, synthetic construct
INTETGEP

SEQ ID NO: 174 - protein, 4 aa, synthetic construct
TETG

SEQ ID NO: 175 - protein, 13 aa, synthetic construct
WMGWINTETGEPT

SEQ ID NO: 176 - protein, 10 aa, synthetic construct
WINTETGEPT

SEQ ID NO: 177 - protein, 9 aa, synthetic construct
WIFPGDGST

SEQ ID NO: 178 - protein, 8 aa, synthetic construct
IFPGDGST

SEQ ID NO: 179 - protein, 17 aa, synthetic construct
WIFPGDGSTKYNEKFKG

SEQ ID NO: 180 - protein, 13 aa, synthetic construct
WIGWIFPGDGSTK

SEQ ID NO: 181 - protein, 10 aa, synthetic construct
WIFPGDGSTK

SEQ ID NO: 182 - protein, 17 aa, synthetic construct
WIFPGDDSIKYNENFRG

SEQ ID NO: 183 - protein, 8 aa, synthetic construct
IFPGDDSI

SEQ ID NO: 184 - protein, 4 aa, synthetic construct
PGDD

SEQ ID NO: 185 - protein, 13 aa, synthetic construct
WIGWIFPGDDSIK

SEQ ID NO: 186 - protein, 10 aa, synthetic construct
WIFPGDDSIK

SEQ ID NO: 187 - protein, 17 aa, synthetic construct
WIFPGDDNAKYNEKFKG

SEQ ID NO: 188 - protein, 8 aa, synthetic construct
IFPGDDNA

SEQ ID NO: 189 - protein, 13 aa, synthetic construct
WIGWIFPGDDNAK

SEQ ID NO: 190 - protein, 10 aa, synthetic construct
WIFPGDDNAK

SEQ ID NO: 191 - protein, 17 aa, synthetic construct
YISNDGDSTYYPDTVQG

SEQ ID NO: 192 - protein, 8 aa, synthetic construct
ISNDGDST

SEQ ID NO: 193 - protein, 4 aa, synthetic construct
NDGD

SEQ ID NO: 194 - protein, 13 aa, synthetic construct
WVAYISNDGDSTY

SEQ ID NO: 195 - protein, 10 aa, synthetic construct
YISNDGDSTY

SEQ ID NO: 196 - protein, 17 aa, synthetic construct
EIYPGSGHTHYNEDFKG

SEQ ID NO: 197 - protein, 8 aa, synthetic construct
IYPGSGHT

SEQ ID NO: 198 - protein, 4 aa, synthetic construct
PGSG

SEQ ID NO: 199 - protein, 13 aa, synthetic construct
WIGEIYPGSGHTH

SEQ ID NO: 200 - protein, 10 aa, synthetic construct
EIYPGSGHTH

SEQ ID NO: 201 - protein, 16 aa, synthetic construct
SITSGGTTYYTDSVKG

SEQ ID NO: 202 - protein, 7 aa, synthetic construct
ITSGGTT

SEQ ID NO: 203 - protein, 12 aa, synthetic construct
WVASITSGGTTY

SEQ ID NO: 204 - protein, 9 aa, synthetic construct
SITSGGTTY

SEQ ID NO: 205 - protein, 17 aa, synthetic construct
MIHPNSGSSNYNEKFKN

SEQ ID NO: 206 - protein, 8 aa, synthetic construct
IHPNSGSS

SEQ ID NO: 207 - protein, 4 aa, synthetic construct
PNSG

SEQ ID NO: 208 - protein, 13 aa, synthetic construct
WIGMIHPNSGSSN

SEQ ID NO: 209 - protein, 10 aa, synthetic construct
MIHPNSGSSN

SEQ ID NO: 210 - protein, 17 aa, synthetic construct
EIDPSDSYTNYNQKFKG

SEQ ID NO: 211 - protein, 8 aa, synthetic construct
IDPSDSYT

SEQ ID NO: 212 - protein, 4 aa, synthetic construct
PSDS

SEQ ID NO: 213 - protein, 13 aa, synthetic construct
WIGEIDPSDSYTN

SEQ ID NO: 214 - protein, 10 aa, synthetic construct
EIDPSDSYTN

SEQ ID NO: 215 - protein, 16 aa, synthetic construct
HIANDGSNYYNPFLKH

SEQ ID NO: 216 - protein, 7 aa, synthetic construct
IANDGSN

SEQ ID NO: 217 - skipped

SEQ ID NO: 218 - protein, 12 aa, synthetic construct
WMGHIANDGSNY

SEQ ID NO: 219 - protein, 9 aa, synthetic construct
HIANDGSNY

SEQ ID NO: 220 - protein, 7 aa, synthetic construct
IWGFGST

SEQ ID NO: 221 - protein, 13 aa, synthetic construct
WALYFLYGGSMDY

SEQ ID NO: 222 - protein, 15 aa, synthetic construct
ARWALYFLYGGSMDY

SEQ ID NO: 223 - protein, 11 aa, synthetic construct
ALYFLYGGSMD

SEQ ID NO: 224 - protein, 14 aa, synthetic construct
ARWALYFLYGGSMD

SEQ ID NO: 225 - protein, 9 aa, synthetic construct
RYGPEDIDY

SEQ ID NO: 226 - protein, 11 aa, synthetic construct
ARRYGPEDIDY

SEQ ID NO: 227 - protein, 7 aa, synthetic construct
YGPEDID

SEQ ID NO: 228 - protein, 10 aa, synthetic construct
ARRYGPEDID

SEQ ID NO: 229 - protein, 5 aa, synthetic construct
ATGNY

SEQ ID NO: 230 - protein, 7 aa, synthetic construct
ASATGNY

SEQ ID NO: 231 - skipped

SEQ ID NO: 232 - protein, 6 aa, synthetic construct
ASATGN

SEQ ID NO: 233 - protein, 13 aa, synthetic construct
EGLYYDYDRYFDY

SEQ ID NO: 234 - protein, 15 aa, synthetic construct
AREGLYYDYDRYFDY

SEQ ID NO: 235 - protein, 11 aa, synthetic construct
GLYYDYDRYFD

SEQ ID NO: 236 - protein, 14 aa, synthetic construct
AREGLYYDYDRYFD

SEQ ID NO: 237 - protein, 9 aa, synthetic construct
QDWNWYFDV

SEQ ID NO: 238 - protein, 11 aa, synthetic construct
VRQDWNWYFDV

SEQ ID NO: 239 - protein, 7 aa, synthetic construct
DWNWYFD

SEQ ID NO: 240 - protein, 10 aa, synthetic construct
VRQDWNWYFD

SEQ ID NO: 241 - protein, 8 aa, synthetic construct
IHTTAGSY

SEQ ID NO: 242 - protein, 10 aa, synthetic construct
ARIHTTAGSY

SEQ ID NO: 243 - protein, 6 aa, synthetic construct
HTTAGS

SEQ ID NO: 244 - protein, 9 aa, synthetic construct
ARIHTTAGS

SEQ ID NO: 245 - protein, 9 aa, synthetic construct
FDWNWYFHV

SEQ ID NO: 246 - protein, 11 aa, synthetic construct
ARFDWNWYFHV

SEQ ID NO: 247 - protein, 7 aa, synthetic construct
DWNWYFH

SEQ ID NO: 248 - protein, 10 aa, synthetic construct
ARFDWNWYFH

SEQ ID NO: 249 - protein, 16 aa, synthetic construct
AYLLRLRRTGYYAMDY

SEQ ID NO: 250 - protein, 18 aa, synthetic construct
ARAYLLRLRRTGYYAMDY

SEQ ID NO: 251 - protein, 14 aa, synthetic construct
YLLRLRRTGYYAMD

SEQ ID NO: 252 - protein, 17 aa, synthetic construct
ARAYLLRLRRTGYYAMD

SEQ ID NO: 253 - protein, 12 aa, synthetic construct
RSSYYPYWYFDV

SEQ ID NO: 254 - protein, 14 aa, synthetic construct
ARRSSYYPYWYFDV

SEQ ID NO: 255 - protein, 10 aa, synthetic construct
SSYYPYWYFD

SEQ ID NO: 256 - protein, 13 aa, synthetic construct
ARRSSYYPYWYFD

SEQ ID NO: 257 - protein, 5 aa, synthetic construct
GTLNY

SEQ ID NO: 258 - protein, 7 aa, synthetic construct
VKGTLNY

SEQ ID NO: 259 - skipped

SEQ ID NO: 260 - protein, 6 aa, synthetic construct
VKGTLN

SEQ ID NO: 261 - protein, 11 aa, synthetic construct
SGIYYGSHFVY

SEQ ID NO: 262 - protein, 13 aa, synthetic construct
ARSGIYYGSHFVY

SEQ ID NO: 263 - protein, 9 aa, synthetic construct
GIYYGSHFV

SEQ ID NO: 264 - protein, 12 aa, synthetic construct
ARSGIYYGSHFV

SEQ ID NO: 265 - protein, 11 aa, synthetic construct
SGIFYGNNFAY

SEQ ID NO: 266 - protein, 13 aa, synthetic construct
ARSGIFYGNNFAY

SEQ ID NO: 267 - protein, 9 aa, synthetic construct
GIFYGNNFA

SEQ ID NO: 268 - protein, 12 aa, synthetic construct
ARSGIFYGNNFA

SEQ ID NO: 269 - protein, 10 aa, synthetic construct
TPVLSNYFDY

SEQ ID NO: 270 - protein, 12 aa, synthetic construct
ARTPVLSNYFDY

SEQ ID NO: 271 - protein, 8 aa, synthetic construct
PVLSNYFD

SEQ ID NO: 272 - protein, 11 aa, synthetic construct
ARTPVLSNYFD

SEQ ID NO: 273 - protein, 9 aa, synthetic construct
QGAQATLDY

SEQ ID NO: 274 - protein, 11 aa, synthetic construct
TRQGAQATLDY

SEQ ID NO: 275 - protein, 7 aa, synthetic construct
GAQATLD

SEQ ID NO: 276 - protein, 10 aa, synthetic construct
TRQGAQATLD

SEQ ID NO: 277 - protein, 13 aa, synthetic construct
RIQLLLPVGGFVY

SEQ ID NO: 278 - protein, 15 aa, synthetic construct
ARRIQLLLPVGGFVY

SEQ ID NO: 279 - protein, 11 aa, synthetic construct
IQLLLPVGGFV

SEQ ID NO: 280 - protein, 14 aa, synthetic construct
ARRIQLLLPVGGFV

SEQ ID NO: 281 - protein, 11 aa, synthetic construct
DGNFYYYGMDY

SEQ ID NO: 282 - protein, 13 aa, synthetic construct
ARDGNFYYYGMDY

SEQ ID NO: 283 - protein, 9 aa, synthetic construct
GNFYYYGMD

SEQ ID NO: 284 - protein, 12 aa, synthetic construct
ARDGNFYYYGMD

SEQ ID NO: 285 - protein, 11 aa, synthetic construct
SDYGFIPYFDY

SEQ ID NO: 286 - protein, 13 aa, synthetic construct
ARSDYGFIPYFDY

SEQ ID NO: 287 - protein, 9 aa, synthetic construct
DYGFIPYFD

SEQ ID NO: 288 - protein, 12 aa, synthetic construct
ARSDYGFIPYFD

SEQ ID NO: 289 - protein, 11 aa, synthetic construct
PLDRSAYYFDY

SEQ ID NO: 290 - protein, 13 aa, synthetic construct
ARPLDRSAYYFDY

SEQ ID NO: 291 - protein, 9 aa, synthetic construct
LDRSAYYFD

SEQ ID NO: 292 - protein, 12 aa, synthetic construct
ARPLDRSAYYFD

SEQ ID NO: 293 - protein, 10 aa, synthetic construct
GGSYFDYVDY

SEQ ID NO: 294 - protein, 12 aa, synthetic construct
ARGGSYFDYVDY

SEQ ID NO: 295 - protein, 8 aa, synthetic construct
GSYFDYVD

SEQ ID NO: 296 - protein, 11 aa, synthetic construct
ARGGSYFDYVD

SEQ ID NO: 297 - protein, 16 aa, synthetic construct
RSSQSLVHSSGITYLH

SEQ ID NO: 298 - protein, 11 aa, synthetic construct
QSLVHSSGITY

SEQ ID NO: 299 - protein, 12 aa, synthetic construct
SQSLVHSSGITY

SEQ ID NO: 300 - protein, 12 aa, synthetic construct
VHSSGITYLHWY

SEQ ID NO: 301 - protein, 15 aa, synthetic construct
RASESVDNYGISFMS

SEQ ID NO: 302 - protein, 10 aa, synthetic construct
ESVDNYGISF

SEQ ID NO: 303 - protein, 11 aa, synthetic construct
SESVDNYGISF

SEQ ID NO: 304 - protein, 11 aa, synthetic construct
DNYGISFMSWF

SEQ ID NO: 305 - protein, 11 aa, synthetic construct
RASQDIGSSLN

SEQ ID NO: 306 - protein, 6 aa, synthetic construct
QDIGSS

SEQ ID NO: 307 - protein, 7 aa, synthetic construct
SQDIGSS

SEQ ID NO: 308 - protein, 7 aa, synthetic construct
GSSLNWL

SEQ ID NO: 309 - protein, 15 aa, synthetic construct
RASESVDTYGNSFMH

SEQ ID NO: 310 - protein, 10 aa, synthetic construct
ESVDTYGNSF

SEQ ID NO: 311 - protein, 11 aa, synthetic construct
SESVDTYGNSF

SEQ ID NO: 312 - protein, 11 aa, synthetic construct
DTYGNSFMHWY

SEQ ID NO: 313 - protein, 16 aa, synthetic construct
KSSQSLLDFDGKTYLN

SEQ ID NO: 314 - protein, 11 aa, synthetic construct
QSLLDFDGKTY

SEQ ID NO: 315 - protein, 12 aa, synthetic construct
SQSLLDFDGKTY

SEQ ID NO: 316 - protein, 12 aa, synthetic construct
LDFDGKTYLNWY

SEQ ID NO: 317 - protein, 11 aa, synthetic construct
KASQNVGTNVA

SEQ ID NO: 318 - protein, 6 aa, synthetic construct
QNVGTN

SEQ ID NO: 319 - protein, 7 aa, synthetic construct
SQNVGTN

SEQ ID NO: 320 - protein, 7 aa, synthetic construct
GTNVAWY

SEQ ID NO: 321 - protein, 16 aa, synthetic construct
KSSQSLSDSDGKTYLN

SEQ ID NO: 322 - protein, 11 aa, synthetic construct
QSLSDSDGKTY

SEQ ID NO: 323 - protein, 12 aa, synthetic construct
SQSLSDSDGKTY

SEQ ID NO: 324 - protein, 12 aa, synthetic construct
SDSDGKTYLNWL

SEQ ID NO: 325 - protein, 16 aa, synthetic construct
KSTKSLLNSDEFTYLD

SEQ ID NO: 326 - protein, 11 aa, synthetic construct
KSLLNSDEFTY

SEQ ID NO: 327 - protein, 12 aa, synthetic construct
TKSLLNSDEFTY

SEQ ID NO: 328 - protein, 12 aa, synthetic construct
LNSDEFTYLDWY

SEQ ID NO: 329 - protein, 11 aa, synthetic construct
RPSENIYSYLT

SEQ ID NO: 330 - protein, 6 aa, synthetic construct
ENIYSY

SEQ ID NO: 331 - protein, 7 aa, synthetic construct
SENIYSY

SEQ ID NO: 332 - protein, 7 aa, synthetic construct
YSYLTWF

SEQ ID NO: 333 - protein, 11 aa, synthetic construct
KASQDIKSYLN

SEQ ID NO: 334 - protein, 6 aa, synthetic construct
QDIKSY

SEQ ID NO: 335 - protein, 7 aa, synthetic construct
SQDIKSY

SEQ ID NO: 336 - protein, 7 aa, synthetic construct
KSYLNWF

SEQ ID NO: 337 - protein, 16 aa, synthetic construct
RSSQSLLDSDGKTYLN

SEQ ID NO: 338 - protein, 11 aa, synthetic construct
QSLLDSDGKTY

SEQ ID NO: 339 - protein, 12 aa, synthetic construct
SQSLLDSDGKTY

SEQ ID NO: 340 - protein, 12 aa, synthetic construct
LDSDGKTYLNWL

SEQ ID NO: 341 - protein, 16 aa, synthetic construct
KSSQSLLDGDGETYLS

SEQ ID NO: 342 - protein, 11 aa, synthetic construct
QSLLDGDGETY

SEQ ID NO: 343 - protein, 12 aa, synthetic construct
SQSLLDGDGETY

SEQ ID NO: 344 - protein, 12 aa, synthetic construct
LDGDGETYLSWL

SEQ ID NO: 345 - protein, 11 aa, synthetic construct
KASQDISKYIS

SEQ ID NO: 346 - protein, 6 aa, synthetic construct
QDISKY

SEQ ID NO: 347 - protein, 7 aa, synthetic construct
SQDISKY

SEQ ID NO: 348 - protein, 7 aa, synthetic construct
SKYISWY

SEQ ID NO: 349 - protein, 10 aa, synthetic construct
SASSSVFYMH

SEQ ID NO: 350 - protein, 5 aa, synthetic construct
SSVFY

SEQ ID NO: 351 - protein, 6 aa, synthetic construct
SSSVFY

SEQ ID NO: 352 - protein, 6 aa, synthetic construct
FYMHWY

SEQ ID NO: 353 - protein, 11 aa, synthetic construct
RASQSISNNLH

SEQ ID NO: 354 - protein, 6 aa, synthetic construct
QSISNN

SEQ ID NO: 355 - protein, 7 aa, synthetic construct
SQSISNN

SEQ ID NO: 356 - protein, 7 aa, synthetic construct
SNNLHWY

SEQ ID NO: 357 - protein, 11 aa, synthetic construct
KASQNVGTAVA

SEQ ID NO: 358 - protein, 6 aa, synthetic construct
QNVGTA

SEQ ID NO: 359 - protein, 7 aa, synthetic construct
SQNVGTA

SEQ ID NO: 360 - protein, 7 aa, synthetic construct
GTAVAWY

SEQ ID NO: 361 - protein, 11 aa, synthetic construct
RASQSIGTSIH

SEQ ID NO: 362 - protein, 6 aa, synthetic construct
QSIGTS

SEQ ID NO: 363 - protein, 7 aa, synthetic construct
SQSIGTS

SEQ ID NO: 364 - protein, 7 aa, synthetic construct
GTSIHWY

SEQ ID NO: 365 - protein, 15 aa, synthetic construct
RASESVDFSGNSFMH

SEQ ID NO: 366 - protein, 10 aa, synthetic construct
ESVDFSGNSF

SEQ ID NO: 367 - protein, 11 aa, synthetic construct
SESVDFSGNSF

SEQ ID NO: 368 - protein, 11 aa, synthetic construct
DFSGNSFMHWY

SEQ ID NO: 369 - protein, 11 aa, synthetic construct
RASQDISNYLN

SEQ ID NO: 370 - protein, 6 aa, synthetic construct
QDISNY

SEQ ID NO: 371 - protein, 7 aa, synthetic construct
SQDISNY

SEQ ID NO: 372 - protein, 7 aa, synthetic construct
SNYLNWY

SEQ ID NO: 373 - protein, 7 aa, synthetic construct
KLSNRFS

SEQ ID NO: 374 - skipped

SEQ ID NO: 375 - protein, 10 aa, synthetic construct
LLIYKLSNRF

SEQ ID NO: 376 - protein, 7 aa, synthetic construct
AASHQGS

SEQ ID NO: 377 - skipped

SEQ ID NO: 378 - protein, 10 aa, synthetic construct
LLIYAASHQG

SEQ ID NO: 379 - protein, 7 aa, synthetic construct
ATSSLDS

SEQ ID NO: 380 - skipped

SEQ ID NO: 381 - protein, 10 aa, synthetic construct
RLIYATSSLD

SEQ ID NO: 382 - protein, 7 aa, synthetic construct
LASNLES

SEQ ID NO: 383 - skipped

SEQ ID NO: 384 - protein, 10 aa, synthetic construct
LLIYLASNLE

SEQ ID NO: 385 - protein, 7 aa, synthetic construct
LVSKLDS

SEQ ID NO: 386 - skipped

SEQ ID NO: 387 - protein, 10 aa, synthetic construct
RLFYLVSKLD

SEQ ID NO: 388 - protein, 7 aa, synthetic construct
STSYRYS

SEQ ID NO: 389 - skipped

SEQ ID NO: 390 - protein, 10 aa, synthetic construct
ALVYSTSYRY

SEQ ID NO: 391 - protein, 7 aa, synthetic construct
LVSRLGS

SEQ ID NO: 392 - protein, 10 aa, synthetic construct
RLIYLVSRLG

SEQ ID NO: 393 - protein, 7 aa, synthetic construct
LVSNRFS

SEQ ID NO: 394 - protein, 10 aa, synthetic construct
LLIFLVSNRF

SEQ ID NO: 395 - protein, 7 aa, synthetic construct
NAQTLAE

SEQ ID NO: 396 - skipped

SEQ ID NO: 397 - protein, 10 aa, synthetic construct
LLVYNAQTLA

SEQ ID NO: 398 - protein, 7 aa, synthetic construct
RTKRLVD

SEQ ID NO: 399 - skipped

SEQ ID NO: 400 - protein, 10 aa, synthetic construct
TLIYRTKRLV

SEQ ID NO: 401 - protein, 7 aa, synthetic construct
LVSKVDS

SEQ ID NO: 402 - protein, 10 aa, synthetic construct
RLIYLVSKVD

SEQ ID NO: 403 - protein, 10 aa, synthetic construct
RLIYLVSKLD

SEQ ID NO: 404 - protein, 7 aa, synthetic construct
YTSTLQP

SEQ ID NO: 405 - skipped

SEQ ID NO: 406 - protein, 10 aa, synthetic construct
LLIHYTSTLQ

SEQ ID NO: 407 - protein, 10 aa, synthetic construct
LLIYLVSNRF

SEQ ID NO: 408 - protein, 7 aa, synthetic construct
STSNLAS

SEQ ID NO: 409 - protein, 10 aa, synthetic construct
LLIYSTSNLA

SEQ ID NO: 410 - protein, 7 aa, synthetic construct
YASQSIS

SEQ ID NO: 411 - skipped

SEQ ID NO: 412 - protein, 10 aa, synthetic construct
LLIKYASQSI

SEQ ID NO: 413 - protein, 7 aa, synthetic construct
SASNRFT

SEQ ID NO: 414 - skipped

SEQ ID NO: 415 - protein, 10 aa, synthetic construct
ILIYSASNRF

SEQ ID NO: 416 - protein, 7 aa, synthetic construct
YASESIS

SEQ ID NO: 417 - protein, 10 aa, synthetic construct
LLIKYASESI

SEQ ID NO: 418 - protein, 7 aa, synthetic construct
RASNLDS

SEQ ID NO: 419 - skipped

SEQ ID NO: 420 - protein, 10 aa, synthetic construct
LLIYRASNLD

SEQ ID NO: 421 - protein, 7 aa, synthetic construct
YTSRLHS

SEQ ID NO: 422 - protein, 10 aa, synthetic construct
LLIYYTSRLH

SEQ ID NO: 423 - protein, 10 aa, synthetic construct
SQSTHVPPWT

SEQ ID NO: 424 - protein, 7 aa, synthetic construct
STHVPPW

SEQ ID NO: 425 - protein, 9 aa, synthetic construct
SQSTHVPPW

SEQ ID NO: 426 - protein, 9 aa, synthetic construct
LQSKEVPWT

SEQ ID NO: 427 - protein, 6 aa, synthetic construct
SKEVPW

SEQ ID NO: 428 - protein, 8 aa, synthetic construct
LQSKEVPW

SEQ ID NO: 429 - protein, 9 aa, synthetic construct
LQYASSPYT

SEQ ID NO: 430 - protein, 6 aa, synthetic construct
YASSPY

SEQ ID NO: 431 - protein, 8 aa, synthetic construct
LQYASSPY

SEQ ID NO: 432 - protein, 9 aa, synthetic construct
HQNNEDPPA

SEQ ID NO: 433 - protein, 6 aa, synthetic construct
NNEDPP

SEQ ID NO: 434 - protein, 8 aa, synthetic construct
HQNNEDPP

SEQ ID NO: 435 - protein, 9 aa, synthetic construct
WQGTHFPRT

SEQ ID NO: 436 - protein, 6 aa, synthetic construct
GTHFPR

SEQ ID NO: 437 - protein, 8 aa, synthetic construct
WQGTHFPR

SEQ ID NO: 438 - protein, 9 aa, synthetic construct
HQYNSYPLT

SEQ ID NO: 439 - protein, 6 aa, synthetic construct
YNSYPL

SEQ ID NO: 440 - protein, 8 aa, synthetic construct
HQYNSYPL

SEQ ID NO: 441 - protein, 9 aa, synthetic construct
WQGTHFPQT

SEQ ID NO: 442 - protein, 6 aa, synthetic construct
GTHFPQ

SEQ ID NO: 443 - protein, 8 aa, synthetic construct
WQGTHFPQ

SEQ ID NO: 444 - protein, 9 aa, synthetic construct
FQSNYLPYT

SEQ ID NO: 445 - protein, 6 aa, synthetic construct
SNYLPY

SEQ ID NO: 446 - protein, 8 aa, synthetic construct
FQSNYLPY

SEQ ID NO: 447 - protein, 9 aa, synthetic construct
QHYYGYPFT

SEQ ID NO: 448 - protein, 6 aa, synthetic construct
YYGYPF

SEQ ID NO: 449 - protein, 8 aa, synthetic construct
QHYYGYPF

SEQ ID NO: 450 - protein, 9 aa, synthetic construct
LQYVEFPLT

SEQ ID NO: 451 - protein, 6 aa, synthetic construct
YVEFPL

SEQ ID NO: 452 - protein, 8 aa, synthetic construct
LQYVEFPL

SEQ ID NO: 453 - protein, 9 aa, synthetic construct
WQGTHFPLT

SEQ ID NO: 454 - protein, 6 aa, synthetic construct
GTHFPL

SEQ ID NO: 455 - protein, 8 aa, synthetic construct
WQGTHFPL

SEQ ID NO: 456 - protein, 9 aa, synthetic construct
CQSTHFPLT

SEQ ID NO: 457 - protein, 6 aa, synthetic construct
STHFPL

SEQ ID NO: 458 - protein, 8 aa, synthetic construct
CQSTHFPL

SEQ ID NO: 459 - protein, 8 aa, synthetic construct
LQYDNLYT

SEQ ID NO: 460 - protein, 5 aa, synthetic construct
YDNLY

SEQ ID NO: 461 - protein, 7 aa, synthetic construct
LQYDNLY

SEQ ID NO: 462 - protein, 6 aa, synthetic construct
HQWSST

SEQ ID NO: 463 - skipped

SEQ ID NO: 464 - protein, 5 aa, synthetic construct
HQWSS

SEQ ID NO: 465 - protein, 9 aa, synthetic construct
QQSNSWPHT

SEQ ID NO: 466 - protein, 6 aa, synthetic construct
SNSWPH

SEQ ID NO: 467 - protein, 8 aa, synthetic construct
QQSNSWPH

SEQ ID NO: 468 - protein, 8 aa, synthetic construct
QQYSSYFT

SEQ ID NO: 469 - protein, 5 aa, synthetic construct
YSSYF

SEQ ID NO: 470 - protein, 7 aa, synthetic construct
QQYSSYF

SEQ ID NO: 471 - protein, 10 aa, synthetic construct
QQSNSWPTFT

SEQ ID NO: 472 - protein, 7 aa, synthetic construct
SNSWPTF

SEQ ID NO: 473 - protein, 9 aa, synthetic construct
QQSNSWPTF

SEQ ID NO: 474 - protein, 9 aa, synthetic construct
QQSNEDPYT

SEQ ID NO: 475 - protein, 6 aa, synthetic construct
SNEDPY

SEQ ID NO: 476 - protein, 8 aa, synthetic construct
QQSNEDPY

SEQ ID NO: 477 - protein, 9 aa, synthetic construct
QQGNTLPFT

SEQ ID NO: 478 - protein, 6 aa, synthetic construct
GNTLPF

SEQ ID NO: 479 - protein, 8 aa, synthetic construct
QQGNTLPF

SEQ ID NO: 480 - protein, 118 aa, synthetic construct
EVQLQQSGPELVKPGASVKISCKASGFTFTDYYMNWVKQSHGKSLEWIGDIIPNNGVTSYNQKFKGKATLTVDKSSSTAYMELRSLTSEDSAVYYCAREWLLRGMDYWGQGTSVTVSS

SEQ ID NO: 481 - protein, 112 aa, synthetic construct
DIVMTQAAFSNPVTLGTSASISCRSSKSLLHSNGITYLYWYLQKPGQSPQLLIYQMSNLASGVPDRFSSSGSGTDFTLRISRVEAEDVGVYYCAQHLELTWTFGGGTKLEIK

SEQ ID NO: 482 - protein, 117 aa, synthetic construct
EVQLQQSGPELVKPGASVKMSCKASGYTFTDYYMNWVKQTHGKSLEWIGDINPNNGGPIYNQKFKGKATLTVDKSSSTAYMELRSLTSEDSAVYYCARSDSAWFTYWGQGTLVTVSA

SEQ ID NO: 483 - protein, 106 aa, synthetic construct
QIVLTQSPAIMSASPGEKVTMTCSASSSVSYMYWYQQKPGSSPRLLIYDTSNLASGVPVRFSGSGSGTFYSITISRMEAEDAATYYCQQWNSYPPTFGGGTKLEIK

SEQ ID NO: 484 - protein, 117 aa, synthetic construct
EVQLQQSGPELVKPGASVKISCKASGYTFTDYYMNWVKQSHGKSLEWIGDINPNNGGTTYNQKFKGKATLTVDKSSSTAYMELRSLTSEDSAVYYCARQGPWYFDVWGTGTTVTVSS

SEQ ID NO: 485 - protein, 112 aa, synthetic construct
DVLMTQTPLSLPVSLGDQASISCRSSQTIVHSNGYTYLEWYLQKPGQSPKLLIYKVSNRFSGVPDRFSGSGSGTDFTLKISRVEAEDLGVYYCFQGSHVPWTFGGGTKLEIK

SEQ ID NO: 486 - protein, 113 aa, synthetic construct
QVQLKQSGPGLVQPSQSLSITCTVSGFSLTSYGVHWVRQSPGKGLDWLGVLWSGGSTDYNAAFISRLSISKDNSKSQVFFKMNSLQADDTAIYYCARNFGDYWGQGTSVTVSS

SEQ ID NO: 487 - protein, 106 aa, synthetic construct
QIVLTQSPAIMSASPGEKVTMTCSASSRVSYMHWYQQKSGTSPKRWIYDTSKLASGVPARFSGSGSGTSYSLTISSMEAEDAATYYCQQWNNNPPTFGAGTTLELK

SEQ ID NO: 488 - protein, 10 aa, synthetic construct
GFTFTDYYMN

SEQ ID NO: 489 - protein, 10 aa, synthetic construct
GYTFTDYYMN

SEQ ID NO: 490 - protein, 5 aa, synthetic construct
DYYMN

SEQ ID NO: 491 - protein, 6 aa, synthetic construct
TDYYMN

SEQ ID NO: 492 - protein, 10 aa, synthetic construct
GFSLTSYGVH

SEQ ID NO: 493 - protein, 8 aa, synthetic construct
GFSLTSYG

SEQ ID NO: 494 - protein, 5 aa, synthetic construct
SYGVH

SEQ ID NO: 495 - protein, 7 aa, synthetic construct
GFSLTSY

SEQ ID NO: 496 - protein, 6 aa, synthetic construct
TSYGVH

SEQ ID NO: 497 - protein, 17 aa, synthetic construct
DIIPNNGVTSYNQKFKG

SEQ ID NO: 498 - protein, 8 aa, synthetic construct
IIPNNGVT

SEQ ID NO: 499 - protein, 4 aa, synthetic construct
PNNG

SEQ ID NO: 500 - protein, 13 aa, synthetic construct
WIGDIIPNNGVTS

SEQ ID NO: 501 - protein, 10 aa, synthetic construct
DIIPNNGVTS

SEQ ID NO: 502 - protein, 17 aa, synthetic construct
DINPNNGGPIYNQKFKG

SEQ ID NO: 503 - protein, 8 aa, synthetic construct
INPNNGGP

SEQ ID NO: 504 - protein, 13 aa, synthetic construct
WIGDINPNNGGPI

SEQ ID NO: 505 - protein, 10 aa, synthetic construct
DINPNNGGPI

SEQ ID NO: 506 - protein, 17 aa, synthetic construct
DINPNNGGTTYNQKFKG

SEQ ID NO: 507 - protein, 8 aa, synthetic construct
INPNNGGT

SEQ ID NO: 508 - protein, 13 aa, synthetic construct
WIGDINPNNGGTT

SEQ ID NO: 509 - protein, 10 aa, synthetic construct
DINPNNGGTT

SEQ ID NO: 510 - protein, 16 aa, synthetic construct
VLWSGGSTDYNAAFIS

SEQ ID NO: 511 - protein, 7 aa, synthetic construct
LWSGGST

SEQ ID NO: 512 - skipped

SEQ ID NO: 513 - protein, 12 aa, synthetic construct
WLGVLWSGGSTD

SEQ ID NO: 514 - protein, 9 aa, synthetic construct
VLWSGGSTD

SEQ ID NO: 515 - protein, 9 aa, synthetic construct
EWLLRGMDY

SEQ ID NO: 516 - protein, 11 aa, synthetic construct
AREWLLRGMDY

SEQ ID NO: 517 - protein, 7 aa, synthetic construct
WLLRGMD

SEQ ID NO: 518 - protein, 10 aa, synthetic construct
AREWLLRGMD

SEQ ID NO: 519 - protein, 8 aa, synthetic construct
SDSAWFTY

SEQ ID NO: 520 - protein, 10 aa, synthetic construct
ARSDSAWFTY

SEQ ID NO: 521 - protein, 6 aa, synthetic construct
DSAWFT

SEQ ID NO: 522 - protein, 9 aa, synthetic construct
ARSDSAWFT

SEQ ID NO: 523 - protein, 8 aa, synthetic construct
QGPWYFDV

SEQ ID NO: 524 - protein, 10 aa, synthetic construct
ARQGPWYFDV

SEQ ID NO: 525 - protein, 6 aa, synthetic construct
GPWYFD

SEQ ID NO: 526 - protein, 9 aa, synthetic construct
ARQGPWYFD

SEQ ID NO: 527 - protein, 5 aa, synthetic construct
NFGDY

SEQ ID NO: 528 - protein, 7 aa, synthetic construct
ARNFGDY

SEQ ID NO: 529 - skipped

SEQ ID NO: 530 - protein, 6 aa, synthetic construct
ARNFGD

SEQ ID NO: 531 - protein, 16 aa, synthetic construct
RSSKSLLHSNGITYLY

SEQ ID NO: 532 - protein, 11 aa, synthetic construct
KSLLHSNGITY

SEQ ID NO: 533 - protein, 12 aa, synthetic construct
SKSLLHSNGITY

SEQ ID NO: 534 - protein, 12 aa, synthetic construct
LHSNGITYLYWY

SEQ ID NO: 535 - protein, 10 aa, synthetic construct
SASSSVSYMY

SEQ ID NO: 536 - protein, 5 aa, synthetic construct
SSVSY

SEQ ID NO: 537 - protein, 6 aa, synthetic construct
SSSVSY

SEQ ID NO: 538 - protein, 6 aa, synthetic construct
SYMYWY

SEQ ID NO: 539 - protein, 16 aa, synthetic construct
RSSQTIVHSNGYTYLE

SEQ ID NO: 540 - protein, 11 aa, synthetic construct
QTIVHSNGYTY

SEQ ID NO: 541 - protein, 12 aa, synthetic construct
SQTIVHSNGYTY

SEQ ID NO: 542 - protein, 12 aa, synthetic construct
VHSNGYTYLEWY

SEQ ID NO: 543 - protein, 10 aa, synthetic construct
SASSRVSYMH

SEQ ID NO: 544 - protein, 5 aa, synthetic construct
SRVSY

SEQ ID NO: 545 - protein, 6 aa, synthetic construct
SSRVSY

SEQ ID NO: 546 - protein, 6 aa, synthetic construct
SYMHWY

SEQ ID NO: 547 - protein, 7 aa, synthetic construct
QMSNLAS

SEQ ID NO: 548 - skipped

SEQ ID NO: 549 - protein, 10 aa, synthetic construct
LLIYQMSNLA

SEQ ID NO: 550 - protein, 7 aa, synthetic construct
DTSNLAS

SEQ ID NO: 551 - skipped

SEQ ID NO: 552 - protein, 10 aa, synthetic construct
LLIYDTSNLA

SEQ ID NO: 553 - protein, 7 aa, synthetic construct
KVSNRFS

SEQ ID NO: 554 - skipped

SEQ ID NO: 555 - protein, 10 aa, synthetic construct
LLIYKVSNRF

SEQ ID NO: 556 - protein, 7 aa, synthetic construct
DTSKLAS

SEQ ID NO: 557 - protein, 10 aa, synthetic construct
RWIYDTSKLA

SEQ ID NO: 558 - protein, 9 aa, synthetic construct
AQHLELTWT

SEQ ID NO: 559 - protein, 6 aa, synthetic construct
HLELTW

SEQ ID NO: 560 - protein, 8 aa, synthetic construct
AQHLELTW

SEQ ID NO: 561 - protein, 9 aa, synthetic construct
QQWNSYPPT

SEQ ID NO: 562 - protein, 6 aa, synthetic construct
WNSYPP

SEQ ID NO: 563 - protein, 8 aa, synthetic construct
QQWNSYPP

SEQ ID NO: 564 - protein, 9 aa, synthetic construct
FQGSHVPWT

SEQ ID NO: 565 - protein, 7 aa, synthetic construct
QGSHVPW

SEQ ID NO: 566 - protein, 8 aa, synthetic construct
FQGSHVPW

SEQ ID NO: 567 - protein, 9 aa, synthetic construct
QQWNNNPPT

SEQ ID NO: 568 - protein, 6 aa, synthetic construct
WNNNPP

SEQ ID NO: 569 - protein, 8 aa, synthetic construct
QQWNNNPP

SEQ ID NO: 570 - protein, 25 aa, synthetic construct
QVQLQESGPGLVKPSETLSLTCTVS

SEQ ID NO: 571 - protein, 25 aa, synthetic construct
QMQLQESGPGLVKPSETLSLTCTVS

SEQ ID NO: 572 - protein, 25 aa, synthetic construct [sequence omitted]

SEQ ID NO: 573 - protein, 25 aa, synthetic construct
QIQLVQSGAEVKKPGSSVKVSCKAS

SEQ ID NO: 574 - protein, 25 aa, synthetic construct
QVQLVQSGAEVKKPGATVKISCKVS

SEQ ID NO: 575 - protein, 25 aa, synthetic construct
QIQLVQSGAEVKKPGATVKISCKVS

SEQ ID NO: 576 - protein, 25 aa, synthetic construct
QVQLVQSGAEVVKPGSSVKVSCKAS

SEQ ID NO: 577 - protein, 25 aa, synthetic construct [sequence omitted]

SEQ ID NO: 578 - protein, 25 aa, synthetic construct
EVQLVQSGAEVKKPGESLKISCKGS

SEQ ID NO: 579 - protein, 14 aa, synthetic construct
WIRQPPGKGLEWIG

SEQ ID NO: 580 - protein, 14 aa, synthetic construct
WIRQPPGKGLEWLG

SEQ ID NO: 581 - protein, 14 aa, synthetic construct
WVRQAPGQGLEWMG

SEQ ID NO: 582 - protein, 14 aa, synthetic construct
WVRQAPGKGLEWMG

SEQ ID NO: 583 - protein, 14 aa, synthetic construct
WVRQAPGQALEWMG

SEQ ID NO: 584 - protein, 14 aa, synthetic construct
WVRQAPGQGLKWMG

SEQ ID NO: 585 - protein, 14 aa, synthetic construct
WVRQAPGKALEWMG

SEQ ID NO: 586 - protein, 14 aa, synthetic construct
WVRQAPGKGLKWMG

SEQ ID NO: 587 - protein, 14 aa, synthetic construct
WVRQAPGQALKWMG

SEQ ID NO: 588 - protein, 14 aa, synthetic construct
WVRQAPGKALKWMG

SEQ ID NO: 589 - protein, 14 aa, synthetic construct
WVKQAPGQGLEWIG

SEQ ID NO: 590 - protein, 14 aa, synthetic construct
WVRQAPGQGLEWIG

SEQ ID NO: 591 - protein, 14 aa, synthetic construct
WVRQAPGQGLEWIA

SEQ ID NO: 592 - protein, 14 aa, synthetic construct
WVKQAPGQGLEWIG

SEQ ID NO: 593 - protein, 14 aa, synthetic construct
WVKQAPGQGLEWIA

SEQ ID NO: 594 - protein, 14 aa, synthetic construct
WVRQAPGQGLEWIA

SEQ ID NO: 595 - protein, 14 aa, synthetic construct
WVKQAPGQGLEWIA

SEQ ID NO: 596 - protein, 14 aa, synthetic construct
WMQQAPGKGLEWIG

SEQ ID NO: 597 - protein, 14 aa, synthetic construct
WVRQAPGQRLEWMG

SEQ ID NO: 598 - protein, 14 aa, synthetic construct
WVRQAPGQRLEWIG

SEQ ID NO: 599 - protein, 14 aa, synthetic construct
WVRQAPGQRLEWMA

SEQ ID NO: 600 - protein, 14 aa, synthetic construct
WVRQAPGQRLEWIA

SEQ ID NO: 601 - protein, 14 aa, synthetic construct
WVRQMPGKGLEWMG

SEQ ID NO: 602 - protein, 14 aa, synthetic construct
WVRQMPGKGLEWIG

SEQ ID NO: 603 - protein, 32 aa, synthetic construct
RVTISVDTSKNQFSLKLSSVTAADTAVYYCAR

SEQ ID NO: 604 - protein, 32 aa, synthetic construct
RLTISVDTSKNQFSLKLSSVTAADTAVYYCAR

SEQ ID NO: 605 - protein, 32 aa, synthetic construct
RVTISKDTSKNQFSLKLSSVTAADTAVYYCAR

SEQ ID NO: 606 - protein, 32 aa, synthetic construct
RVTISVDNSKNQFSLKLSSVTAADTAVYYCAR

SEQ ID NO: 607 - protein, 32 aa, synthetic construct
RVTISVDTSKSQFSLKLSSVTAADTAVYYCAR

SEQ ID NO: 608 - protein, 32 aa, synthetic construct
RVTISVDTSKNQVSLKLSSVTAADTAVYYCAR

SEQ ID NO: 609 - protein, 32 aa, synthetic construct
RVTISVDTSKNQFSFKLSSVTAADTAVYYCAR

SEQ ID NO: 610 - protein, 32 aa, synthetic construct
RVTISVDTSKNQFSLKMSSVTAADTAVYYCAR

SEQ ID NO: 611 - protein, 32 aa, synthetic construct
RVTISVDTSKNQFSLKLSSLTAADTAVYYCAR

SEQ ID NO: 612 - protein, 32 aa, synthetic construct
RVTISVDTSKNQFSLKLSSVQAADTAVYYCAR

SEQ ID NO: 613 - protein, 32 aa, synthetic construct
RVTISVDTSKNQFSLKLSSVTAQDTAVYYCAR

SEQ ID NO: 614 - protein, 32 aa, synthetic construct
RLTISKDTSKNQFSLKLSSVTAADTAVYYCAR

SEQ ID NO: 615 - protein, 32 aa, synthetic construct
RLTISVDNSKNQFSLKLSSVTAADTAVYYCAR

SEQ ID NO: 616 - protein, 32 aa, synthetic construct
RLTISVDTSKSQFSLKLSSVTAADTAVYYCAR

SEQ ID NO: 617 - protein, 32 aa, synthetic construct
RLTISVDTSKNQVSLKLSSVTAADTAVYYCAR

SEQ ID NO: 618 - protein, 32 aa, synthetic construct
RLTISVDTSKNQFSFKLSSVTAADTAVYYCAR

SEQ ID NO: 619 - protein, 32 aa, synthetic construct
RLTISVDTSKNQFSLKMSSVTAADTAVYYCAR

SEQ ID NO: 620 - protein, 32 aa, synthetic construct
RLTISVDTSKNQFSLKLSSLTAADTAVYYCAR

SEQ ID NO: 621 - protein, 32 aa, synthetic construct
RLTISVDTSKNQFSLKLSSVQAADTAVYYCAR

SEQ ID NO: 622 - protein, 32 aa, synthetic construct
RLTISVDTSKNQFSLKLSSVTAQDTAVYYCAR

SEQ ID NO: 623 - protein, 32 aa, synthetic construct
RVTISKDNSKNQFSLKLSSVTAADTAVYYCAR

SEQ ID NO: 624 - protein, 32 aa, synthetic construct
RVTISKDTSKSQFSLKLSSVTAADTAVYYCAR

SEQ ID NO: 625 - protein, 32 aa, synthetic construct
RVTISKDTSKNQVSLKLSSVTAADTAVYYCAR

SEQ ID NO: 626 - protein, 32 aa, synthetic construct
RVTISKDTSKNQFSFKLSSVTAADTAVYYCAR

SEQ ID NO: 627 - protein, 32 aa, synthetic construct
RVTISKDTSKNQFSLKMSSVTAADTAVYYCAR

SEQ ID NO: 628 - protein, 32 aa, synthetic construct
RVTISKDTSKNQFSLKLSSLTAADTAVYYCAR

SEQ ID NO: 629 - protein, 32 aa, synthetic construct
RVTISKDTSKNQFSLKLSSVQAADTAVYYCAR

SEQ ID NO: 630 - protein, 32 aa, synthetic construct
RVTISKDTSKNQFSLKLSSVTAQDTAVYYCAR

SEQ ID NO: 631 - protein, 32 aa, synthetic construct
RVTISVDNSKSQFSLKLSSVTAADTAVYYCAR

SEQ ID NO: 632 - protein, 32 aa, synthetic construct
RVTISVDNSKNQVSLKLSSVTAADTAVYYCAR

SEQ ID NO: 633 - protein, 32 aa, synthetic construct
RVTISVDNSKNQFSFKLSSVTAADTAVYYCAR

SEQ ID NO: 634 - protein, 32 aa, synthetic construct
RVTISVDNSKNQFSLKMSSVTAADTAVYYCAR

SEQ ID NO: 635 - protein, 32 aa, synthetic construct
RVTISVDNSKNQFSLKLSSLTAADTAVYYCAR

SEQ ID NO: 636 - protein, 32 aa, synthetic construct
RVTISVDNSKNQFSLKLSSVQAADTAVYYCAR

SEQ ID NO: 637 - protein, 32 aa, synthetic construct
RVTISVDNSKNQFSLKLSSVTAQDTAVYYCAR

SEQ ID NO: 638 - protein, 32 aa, synthetic construct
RVTISVDTSKSQVSLKLSSVTAADTAVYYCAR

SEQ ID NO: 639 - protein, 32 aa, synthetic construct
RVTISVDTSKSQFSFKLSSVTAADTAVYYCAR

SEQ ID NO: 640 - protein, 32 aa, synthetic construct
RVTISVDTSKSQFSLKMSSVTAADTAVYYCAR

SEQ ID NO: 641 - protein, 32 aa, synthetic construct
RVTISVDTSKSQFSLKLSSLTAADTAVYYCAR

SEQ ID NO: 642 - protein, 32 aa, synthetic construct
RVTISVDTSKSQFSLKLSSVQAADTAVYYCAR

SEQ ID NO: 643 - protein, 32 aa, synthetic construct
RVTISVDTSKSQFSLKLSSVTAQDTAVYYCAR

SEQ ID NO: 644 - protein, 32 aa, synthetic construct
RVTISVDTSKNQVSFKLSSVTAADTAVYYCAR

SEQ ID NO: 645 - protein, 32 aa, synthetic construct
RVTISVDTSKNQVSLKMSSVTAADTAVYYCAR

SEQ ID NO: 646 - protein, 32 aa, synthetic construct
RVTISVDTSKNQVSLKLSSLTAADTAVYYCAR

SEQ ID NO: 647 - protein, 32 aa, synthetic construct
RVTISVDTSKNQVSLKLSSVQAADTAVYYCAR

SEQ ID NO: 648 - protein, 32 aa, synthetic construct
RVTISVDTSKNQVSLKLSSVTAQDTAVYYCAR

SEQ ID NO: 649 - protein, 32 aa, synthetic construct
RVTISVDTSKNQFSFKMSSVTAADTAVYYCAR

SEQ ID NO: 650 - protein, 32 aa, synthetic construct
RVTISVDTSKNQFSFKLSSLTAADTAVYYCAR

SEQ ID NO: 651 - protein, 32 aa, synthetic construct
RVTISVDTSKNQFSFKLSSVQAADTAVYYCAR

SEQ ID NO: 652 - protein, 32 aa, synthetic construct
RVTISVDTSKNQFSFKLSSVTAQDTAVYYCAR

SEQ ID NO: 653 - protein, 32 aa, synthetic construct
RVTISVDTSKNQFSLKMSSLTAADTAVYYCAR

SEQ ID NO: 654 - protein, 32 aa, synthetic construct
RVTISVDTSKNQFSLKMSSVQAADTAVYYCAR

SEQ ID NO: 655 - protein, 32 aa, synthetic construct
RVTISVDTSKNQFSLKMSSVTAQDTAVYYCAR

SEQ ID NO: 656 - protein, 32 aa, synthetic construct
RVTISVDTSKNQFSLKLSSLQAADTAVYYCAR

SEQ ID NO: 657 - protein, 32 aa, synthetic construct
RVTISVDTSKNQFSLKLSSLTAQDTAVYYCAR

SEQ ID NO: 658 - protein, 32 aa, synthetic construct
RVTISVDTSKNQFSLKLSSVQAQDTAVYYCAR

SEQ ID NO: 659 - protein, 32 aa, synthetic construct
RLTISKDNSKNQFSLKLSSVTAADTAVYYCAR

SEQ ID NO: 660 - protein, 32 aa, synthetic construct
RLTISKDTSKSQFSLKLSSVTAADTAVYYCAR

SEQ ID NO: 661 - protein, 32 aa, synthetic construct
RLTISKDTSKNQVSLKLSSVTAADTAVYYCAR

SEQ ID NO: 662 - protein, 32 aa, synthetic construct
RLTISKDTSKNQFSFKLSSVTAADTAVYYCAR

SEQ ID NO: 663 - protein, 32 aa, synthetic construct
RLTISKDTSKNQFSLKMSSVTAADTAVYYCAR

SEQ ID NO: 664 - protein, 32 aa, synthetic construct
RLTISKDTSKNQFSLKLSSLTAADTAVYYCAR

SEQ ID NO: 665 - protein, 32 aa, synthetic construct
RLTISKDTSKNQFSLKLSSVQAADTAVYYCAR

SEQ ID NO: 666 - protein, 32 aa, synthetic construct
RLTISKDTSKNQFSLKLSSVTAQDTAVYYCAR

SEQ ID NO: 667 - protein, 32 aa, synthetic construct
RLTISVDNSKSQFSLKLSSVTAADTAVYYCAR

SEQ ID NO: 668 - protein, 32 aa, synthetic construct
RLTISVDNSKNQVSLKLSSVTAADTAVYYCAR

SEQ ID NO: 669 - protein, 32 aa, synthetic construct
  REGION 1..32: note = VH Framework 3 (FR3)
RLTISVDNSKNQFSFKLSSVTAADTAVYYCAR

SEQ ID NO: 670 - protein, 32 aa, synthetic construct
RLTISVDNSKNQFSLKMSSVTAADTAVYYCAR

SEQ ID NO: 671 - protein, 32 aa, synthetic construct
RLTISVDNSKNQFSLKLSSLTAADTAVYYCAR

SEQ ID NO: 672 - protein, 32 aa, synthetic construct
RLTISVDNSKNQFSLKLSSVQAADTAVYYCAR

SEQ ID NO: 673 - protein, 32 aa, synthetic construct
RLTISVDNSKNQFSLKLSSVTAQDTAVYYCAR

SEQ ID NO: 674 - protein, 32 aa, synthetic construct
RLTISVDTSKSQVSLKLSSVTAADTAVYYCAR

SEQ ID NO: 675 - protein, 32 aa, synthetic construct
RLTISVDTSKSQFSFKLSSVTAADTAVYYCAR

SEQ ID NO: 676 - protein, 32 aa, synthetic construct
RLTISVDTSKSQFSLKMSSVTAADTAVYYCAR

SEQ ID NO: 677 - protein, 32 aa, synthetic construct
RLTISVDTSKSQFSLKLSSLTAADTAVYYCAR

SEQ ID NO: 678 - protein, 32 aa, synthetic construct
RLTISVDTSKSQFSLKLSSVQAADTAVYYCAR

SEQ ID NO: 679 - protein, 32 aa, synthetic construct
RLTISVDTSKSQFSLKLSSVTAQDTAVYYCAR

SEQ ID NO: 680 - protein, 32 aa, synthetic construct
RLTISVDTSKNQVSFKLSSVTAADTAVYYCAR

SEQ ID NO: 681 - protein, 32 aa, synthetic construct
RLTISVDTSKNQVSLKMSSVTAADTAVYYCAR

SEQ ID NO: 682 - protein, 32 aa, synthetic construct
RLTISVDTSKNQVSLKLSSLTAADTAVYYCAR

SEQ ID NO: 683 - protein, 32 aa, synthetic construct
RLTISVDTSKNQVSLKLSSVQAADTAVYYCAR

SEQ ID NO: 684 - protein, 32 aa, synthetic construct
RLTISVDTSKNQVSLKLSSVTAQDTAVYYCAR

SEQ ID NO: 685 - protein, 32 aa, synthetic construct
RLTISVDTSKNQFSFKMSSVTAADTAVYYCAR

SEQ ID NO: 686 - protein, 32 aa, synthetic construct
RLTISVDTSKNQFSFKLSSLTAADTAVYYCAR

SEQ ID NO: 687 - protein, 32 aa, synthetic construct
RLTISVDTSKNQFSFKLSSVQAADTAVYYCAR

SEQ ID NO: 688 - protein, 32 aa, synthetic construct
RLTISVDTSKNQFSFKLSSVTAQDTAVYYCAR

SEQ ID NO: 689 - protein, 32 aa, synthetic construct
RLTISVDTSKNQFSLKMSSLTAADTAVYYCAR

SEQ ID NO: 690 - protein, 32 aa, synthetic construct
RLTISVDTSKNQFSLKMSSVQAADTAVYYCAR

SEQ ID NO: 691 - protein, 32 aa, synthetic construct
RLTISVDTSKNQFSLKMSSVTAQDTAVYYCAR

SEQ ID NO: 692 - protein, 32 aa, synthetic construct
RLTISVDTSKNQFSLKLSSLQAADTAVYYCAR

SEQ ID NO: 693 - protein, 32 aa, synthetic construct
RLTISVDTSKNQFSLKLSSLTAQDTAVYYCAR

SEQ ID NO: 694 - protein, 32 aa, synthetic construct
RLTISVDTSKNQFSLKLSSVQAQDTAVYYCAR

SEQ ID NO: 695 - protein, 32 aa, synthetic construct
RVTISKDNSKSQFSLKLSSVTAADTAVYYCAR

SEQ ID NO: 696 - protein, 32 aa, synthetic construct
RVTISKDNSKNQVSLKLSSVTAADTAVYYCAR

SEQ ID NO: 697 - protein, 32 aa, synthetic construct
RVTISKDNSKNQFSFKLSSVTAADTAVYYCAR

SEQ ID NO: 698 - protein, 32 aa, synthetic construct
RVTISKDNSKNQFSLKMSSVTAADTAVYYCAR

SEQ ID NO: 699 - protein, 32 aa, synthetic construct
RVTISKDNSKNQFSLKLSSLTAADTAVYYCAR

SEQ ID NO: 700 - protein, 32 aa, synthetic construct
RVTISKDNSKNQFSLKLSSVQAADTAVYYCAR

SEQ ID NO: 701 - protein, 32 aa, synthetic construct
RVTISKDNSKNQFSLKLSSVTAQDTAVYYCAR

SEQ ID NO: 702 - protein, 32 aa, synthetic construct
RVTISKDTSKSQVSLKLSSVTAADTAVYYCAR

SEQ ID NO: 703 - protein, 32 aa, synthetic construct
RVTISKDTSKSQFSFKLSSVTAADTAVYYCAR

SEQ ID NO: 704 - protein, 32 aa, synthetic construct
RVTISKDTSKSQFSLKMSSVTAADTAVYYCAR

SEQ ID NO: 705 - protein, 32 aa, synthetic construct
RVTISKDTSKSQFSLKLSSLTAADTAVYYCAR

SEQ ID NO: 706 - protein, 32 aa, synthetic construct
RVTISKDTSKSQFSLKLSSVQAADTAVYYCAR

SEQ ID NO: 707 - protein, 32 aa, synthetic construct
RVTISKDTSKSQFSLKLSSVTAQDTAVYYCAR

SEQ ID NO: 708 - protein, 32 aa, synthetic construct
RVTISKDTSKNQVSFKLSSVTAADTAVYYCAR

SEQ ID NO: 709 - protein, 32 aa, synthetic construct
RVTISKDTSKNQVSLKMSSVTAADTAVYYCAR

SEQ ID NO: 710 - protein, 32 aa, synthetic construct
RVTISKDTSKNQVSLKLSSLTAADTAVYYCAR

SEQ ID NO: 711 - protein, 32 aa, synthetic construct
RVTISKDTSKNQVSLKLSSVQAADTAVYYCAR

SEQ ID NO: 712 - protein, 32 aa, synthetic construct
RVTISKDTSKNQVSLKLSSVTAQDTAVYYCAR

SEQ ID NO: 713 - protein, 32 aa, synthetic construct
RVTISKDTSKNQFSFKMSSVTAADTAVYYCAR

SEQ ID NO: 714 - protein, 32 aa, synthetic construct
RVTISKDTSKNQFSFKLSSLTAADTAVYYCAR

SEQ ID NO: 715 - protein, 32 aa, synthetic construct
RVTISKDTSKNQFSFKLSSVQAADTAVYYCAR

SEQ ID NO: 716 - protein, 32 aa, synthetic construct
RVTISKDTSKNQFSFKLSSVTAQDTAVYYCAR

SEQ ID NO: 717 - protein, 32 aa, synthetic construct
RVTISKDTSKNQFSLKMSSLTAADTAVYYCAR

SEQ ID NO: 718 - protein, 32 aa, synthetic construct
RVTISKDTSKNQFSLKMSSVQAADTAVYYCAR

SEQ ID NO: 719 - protein, 32 aa, synthetic construct
RVTISKDTSKNQFSLKMSSVTAQDTAVYYCAR

SEQ ID NO: 720 - protein, 32 aa, synthetic construct
RVTISKDTSKNQFSLKLSSLQAADTAVYYCAR

SEQ ID NO: 721 - protein, 32 aa, synthetic construct
RVTISKDTSKNQFSLKLSSLTAQDTAVYYCAR

SEQ ID NO: 722 - protein, 32 aa, synthetic construct
RVTISKDTSKNQFSLKLSSVQAQDTAVYYCAR

SEQ ID NO: 723 - protein, 32 aa, synthetic construct
RVTISVDNSKSQVSLKLSSVTAADTAVYYCAR

SEQ ID NO: 724 - protein, 32 aa, synthetic construct
RVTISVDNSKSQFSFKLSSVTAADTAVYYCAR

SEQ ID NO: 725 - protein, 32 aa, synthetic construct
RVTISVDNSKSQFSLKMSSVTAADTAVYYCAR

SEQ ID NO: 726 - protein, 32 aa, synthetic construct
RVTISVDNSKSQFSLKLSSLTAADTAVYYCAR

SEQ ID NO: 727 - protein, 32 aa, synthetic construct
RVTISVDNSKSQFSLKLSSVQAADTAVYYCAR

SEQ ID NO: 728 - protein, 32 aa, synthetic construct
RVTISVDNSKSQFSLKLSSVTAQDTAVYYCAR

SEQ ID NO: 729 - protein, 32 aa, synthetic construct
RVTISVDNSKNQVSFKLSSVTAADTAVYYCAR

SEQ ID NO: 730 - protein, 32 aa, synthetic construct
RVTISVDNSKNQVSLKMSSVTAADTAVYYCAR

SEQ ID NO: 731 - protein, 32 aa, synthetic construct
RVTISVDNSKNQVSLKLSSLTAADTAVYYCAR

SEQ ID NO: 732 - protein, 32 aa, synthetic construct
RVTISVDNSKNQVSLKLSSVQAADTAVYYCAR

SEQ ID NO: 733 - protein, 32 aa, synthetic construct
RVTISVDNSKNQVSLKLSSVTAQDTAVYYCAR

SEQ ID NO: 734 - protein, 32 aa, synthetic construct
RVTISVDNSKNQFSFKMSSVTAADTAVYYCAR

SEQ ID NO: 735 - protein, 32 aa, synthetic construct
RVTISVDNSKNQFSFKLSSLTAADTAVYYCAR

SEQ ID NO: 736 - protein, 32 aa, synthetic construct
RVTISVDNSKNQFSFKLSSVQAADTAVYYCAR

SEQ ID NO: 737 - protein, 32 aa, synthetic construct
RVTISVDNSKNQFSFKLSSVTAQDTAVYYCAR

SEQ ID NO: 738 - protein, 32 aa, synthetic construct
RVTISVDNSKNQFSLKMSSLTAADTAVYYCAR

SEQ ID NO: 739 - protein, 32 aa, synthetic construct
RVTISVDNSKNQFSLKMSSVQAADTAVYYCAR

SEQ ID NO: 740 - protein, 32 aa, synthetic construct
RVTISVDNSKNQFSLKMSSVTAQDTAVYYCAR

SEQ ID NO: 741 - protein, 32 aa, synthetic construct
RVTISVDNSKNQFSLKLSSLQAADTAVYYCAR

SEQ ID NO: 742 - protein, 32 aa, synthetic construct
RVTISVDNSKNQFSLKLSSLTAQDTAVYYCAR

SEQ ID NO: 743 - protein, 32 aa, synthetic construct
RVTISVDNSKNQFSLKLSSVQAQDTAVYYCAR

SEQ ID NO: 744 - protein, 32 aa, synthetic construct
RVTISVDTSKSQVSFKLSSVTAADTAVYYCAR

SEQ ID NO: 745 - protein, 32 aa, synthetic construct
RVTISVDTSKSQVSLKMSSVTAADTAVYYCAR

SEQ ID NO: 746 - protein, 32 aa, synthetic construct
RVTISVDTSKSQVSLKLSSLTAADTAVYYCAR

SEQ ID NO: 747 - protein, 32 aa, synthetic construct
RVTISVDTSKSQVSLKLSSVQAADTAVYYCAR

SEQ ID NO: 748 - protein, 32 aa, synthetic construct
RVTISVDTSKSQVSLKLSSVTAQDTAVYYCAR

SEQ ID NO: 749 - protein, 32 aa, synthetic construct
RVTISVDTSKSQFSFKMSSVTAADTAVYYCAR

SEQ ID NO: 750 - protein, 32 aa, synthetic construct
RVTISVDTSKSQFSFKLSSLTAADTAVYYCAR

SEQ ID NO: 751 - protein, 32 aa, synthetic construct
RVTISVDTSKSQFSFKLSSVQAADTAVYYCAR

SEQ ID NO: 752 - protein, 32 aa, synthetic construct
RVTISVDTSKSQFSFKLSSVTAQDTAVYYCAR

SEQ ID NO: 753 - protein, 32 aa, synthetic construct
RVTISVDTSKSQFSLKMSSLTAADTAVYYCAR

SEQ ID NO: 754 - protein, 32 aa, synthetic construct
RVTISVDTSKSQFSLKMSSVQAADTAVYYCAR

SEQ ID NO: 755 - protein, 32 aa, synthetic construct
RVTISVDTSKSQFSLKMSSVTAQDTAVYYCAR

SEQ ID NO: 756 - protein, 32 aa, synthetic construct
RVTISVDTSKSQFSLKLSSLQAADTAVYYCAR

SEQ ID NO: 757 - protein, 32 aa, synthetic construct
RVTISVDTSKSQFSLKLSSLTAQDTAVYYCAR

SEQ ID NO: 758 - protein, 32 aa, synthetic construct
RVTISVDTSKSQFSLKLSSVQAQDTAVYYCAR

SEQ ID NO: 759 - protein, 32 aa, synthetic construct
RVTISVDTSKNQVSFKMSSVTAADTAVYYCAR

SEQ ID NO: 760 - protein, 32 aa, synthetic construct
RVTISVDTSKNQVSFKLSSLTAADTAVYYCAR

SEQ ID NO: 761 - protein, 32 aa, synthetic construct
RVTISVDTSKNQVSFKLSSVQAADTAVYYCAR

SEQ ID NO: 762 - protein, 32 aa, synthetic construct
RVTISVDTSKNQVSFKLSSVTAQDTAVYYCAR

SEQ ID NO: 763 - protein, 32 aa, synthetic construct
RVTISVDTSKNQVSLKMSSLTAADTAVYYCAR

SEQ ID NO: 764 - protein, 32 aa, synthetic construct
RVTISVDTSKNQVSLKMSSVQAADTAVYYCAR

SEQ ID NO: 765 - protein, 32 aa, synthetic construct
RVTISVDTSKNQVSLKMSSVTAQDTAVYYCAR

SEQ ID NO: 766 - protein, 32 aa, synthetic construct
RVTISVDTSKNQVSLKLSSLQAADTAVYYCAR

SEQ ID NO: 767 - protein, 32 aa, synthetic construct
RVTISVDTSKNQVSLKLSSLTAQDTAVYYCAR

SEQ ID NO: 768 - protein, 32 aa, synthetic construct
RVTISVDTSKNQVSLKLSSVQAQDTAVYYCAR

SEQ ID NO: 769 - protein, 32 aa, synthetic construct
RVTISVDTSKNQFSFKMSSLTAADTAVYYCAR

SEQ ID NO: 770 - protein, 32 aa, synthetic construct
RVTISVDTSKNQFSFKMSSVQAADTAVYYCAR

SEQ ID NO: 771 - protein, 32 aa, synthetic construct
RVTISVDTSKNQFSFKMSSVTAQDTAVYYCAR

SEQ ID NO: 772 - protein, 32 aa, synthetic construct
RVTISVDTSKNQFSFKLSSLQAADTAVYYCAR

SEQ ID NO: 773 - protein, 32 aa, synthetic construct
RVTISVDTSKNQFSFKLSSLTAQDTAVYYCAR

SEQ ID NO: 774 - protein, 32 aa, synthetic construct
RVTISVDTSKNQFSFKLSSVQAQDTAVYYCAR

SEQ ID NO: 775 - protein, 32 aa, synthetic construct
RVTISVDTSKNQFSLKMSSLQAADTAVYYCAR

SEQ ID NO: 776 - protein, 32 aa, synthetic construct
RVTISVDTSKNQFSLKMSSLTAQDTAVYYCAR

SEQ ID NO: 777 - protein, 32 aa, synthetic construct
RVTISVDTSKNQFSLKMSSVQAQDTAVYYCAR

SEQ ID NO: 778 - protein, 32 aa, synthetic construct
RVTISVDTSKNQFSLKLSSLQAQDTAVYYCAR

SEQ ID NO: 779 - protein, 32 aa, synthetic construct
RLTISKDNSKSQFSLKLSSVTAADTAVYYCAR

SEQ ID NO: 780 - protein, 32 aa, synthetic construct
RLTISKDNSKNQVSLKLSSVTAADTAVYYCAR

SEQ ID NO: 781 - protein, 32 aa, synthetic construct
RLTISKDNSKNQFSFKLSSVTAADTAVYYCAR

SEQ ID NO: 782 - protein, 32 aa, synthetic construct
RLTISKDNSKNQFSLKMSSVTAADTAVYYCAR

SEQ ID NO: 783 - protein, 32 aa, synthetic construct
RLTISKDNSKNQFSLKLSSLTAADTAVYYCAR

SEQ ID NO: 784 - protein, 32 aa, synthetic construct
RLTISKDNSKNQFSLKLSSVQAADTAVYYCAR

SEQ ID NO: 785 - protein, 32 aa, synthetic construct
RLTISKDNSKNQFSLKLSSVTAQDTAVYYCAR

SEQ ID NO: 786 - protein, 32 aa, synthetic construct
RLTISKDTSKSQVSLKLSSVTAADTAVYYCAR

SEQ ID NO: 787 - protein, 32 aa, synthetic construct
RLTISKDTSKSQFSFKLSSVTAADTAVYYCAR

SEQ ID NO: 788 - protein, 32 aa, synthetic construct
RLTISKDTSKSQFSLKMSSVTAADTAVYYCAR

SEQ ID NO: 789 - protein, 32 aa, synthetic construct
RLTISKDTSKSQFSLKLSSLTAADTAVYYCAR

SEQ ID NO: 790 - protein, 32 aa, synthetic construct
RLTISKDTSKSQFSLKLSSVQAADTAVYYCAR

SEQ ID NO: 791 - protein, 32 aa, synthetic construct
RLTISKDTSKSQFSLKLSSVTAQDTAVYYCAR

SEQ ID NO: 792 - protein, 32 aa, synthetic construct
RLTISKDTSKNQVSFKLSSVTAADTAVYYCAR

SEQ ID NO: 793 - protein, 32 aa, synthetic construct
RLTISKDTSKNQVSLKMSSVTAADTAVYYCAR

SEQ ID NO: 794 - protein, 32 aa, synthetic construct
RLTISKDTSKNQVSLKLSSLTAADTAVYYCAR

SEQ ID NO: 795 - protein, 32 aa, synthetic construct
RLTISKDTSKNQVSLKLSSVQAADTAVYYCAR

SEQ ID NO: 796 - protein, 32 aa, synthetic construct
RLTISKDTSKNQVSLKLSSVTAQDTAVYYCAR

SEQ ID NO: 797 - protein, 32 aa, synthetic construct
RLTISKDTSKNQFSFKMSSVTAADTAVYYCAR

SEQ ID NO: 798 - protein, 32 aa, synthetic construct
RLTISKDTSKNQFSFKLSSLTAADTAVYYCAR

SEQ ID NO: 799 - protein, 32 aa, synthetic construct
RLTISKDTSKNQFSFKLSSVQAADTAVYYCAR

SEQ ID NO: 800 - protein, 32 aa, synthetic construct
RLTISKDTSKNQFSFKLSSVTAQDTAVYYCAR

SEQ ID NO: 801 - protein, 32 aa, synthetic construct
RLTISKDTSKNQFSLKMSSLTAADTAVYYCAR

SEQ ID NO: 802 - protein, 32 aa, synthetic construct
RLTISKDTSKNQFSLKMSSVQAADTAVYYCAR

SEQ ID NO: 803 - protein, 32 aa, synthetic construct
RLTISKDTSKNQFSLKMSSVTAQDTAVYYCAR

SEQ ID NO: 804 - protein, 32 aa, synthetic construct
RLTISKDTSKNQFSLKLSSLQAADTAVYYCAR

SEQ ID NO: 805 - protein, 32 aa, synthetic construct
RLTISKDTSKNQFSLKLSSLTAQDTAVYYCAR

SEQ ID NO: 806 - protein, 32 aa, synthetic construct
RLTISKDTSKNQFSLKLSSVQAQDTAVYYCAR

SEQ ID NO: 807 - protein, 32 aa, synthetic construct
RLTISVDNSKSQVSLKLSSVTAADTAVYYCAR

SEQ ID NO: 808 - protein, 32 aa, synthetic construct
RLTISVDNSKSQFSFKLSSVTAADTAVYYCAR

SEQ ID NO: 809 - protein, 32 aa, synthetic construct
RLTISVDNSKSQFSLKMSSVTAADTAVYYCAR

SEQ ID NO: 810 - protein, 32 aa, synthetic construct
RLTISVDNSKSQFSLKLSSLTAADTAVYYCAR

SEQ ID NO: 811 - protein, 32 aa, synthetic construct
RLTISVDNSKSQFSLKLSSVQAADTAVYYCAR

SEQ ID NO: 812 - protein, 32 aa, synthetic construct
RLTISVDNSKSQFSLKLSSVTAQDTAVYYCAR

SEQ ID NO: 813 - protein, 32 aa, synthetic construct
RLTISVDNSKNQVSFKLSSVTAADTAVYYCAR

SEQ ID NO: 814 - protein, 32 aa, synthetic construct
RLTISVDNSKNQVSLKMSSVTAADTAVYYCAR

SEQ ID NO: 815 - protein, 32 aa, synthetic construct
RLTISVDNSKNQVSLKLSSLTAADTAVYYCAR

SEQ ID NO: 816 - protein, 32 aa, synthetic construct
RLTISVDNSKNQVSLKLSSVQAADTAVYYCAR

SEQ ID NO: 817 - protein, 32 aa, synthetic construct
RLTISVDNSKNQVSLKLSSVTAQDTAVYYCAR

SEQ ID NO: 818 - protein, 32 aa, synthetic construct
RLTISVDNSKNQFSFKMSSVTAADTAVYYCAR

SEQ ID NO: 819 - protein, 32 aa, synthetic construct
RLTISVDNSKNQFSFKLSSLTAADTAVYYCAR

SEQ ID NO: 820 - protein, 32 aa, synthetic construct
RLTISVDNSKNQFSFKLSSVQAADTAVYYCAR

SEQ ID NO: 821 - protein, 32 aa, synthetic construct
RLTISVDNSKNQFSFKLSSVTAQDTAVYYCAR

SEQ ID NO: 822 - protein, 32 aa, synthetic construct
RLTISVDNSKNQFSLKMSSLTAADTAVYYCAR

SEQ ID NO: 823 - protein, 32 aa, synthetic construct
RLTISVDNSKNQFSLKMSSVQAADTAVYYCAR

SEQ ID NO: 824 - protein, 32 aa, synthetic construct
RLTISVDNSKNQFSLKMSSVTAQDTAVYYCAR

SEQ ID NO: 825 - protein, 32 aa, synthetic construct
RLTISVDNSKNQFSLKLSSLQAADTAVYYCAR

SEQ ID NO: 826 - protein, 32 aa, synthetic construct
RLTISVDNSKNQFSLKLSSLTAQDTAVYYCAR

SEQ ID NO: 827 - protein, 32 aa, synthetic construct
RLTISVDNSKNQFSLKLSSVQAQDTAVYYCAR

SEQ ID NO: 828 - protein, 32 aa, synthetic construct
RLTISVDTSKSQVSFKLSSVTAADTAVYYCAR

SEQ ID NO: 829 - protein, 32 aa, synthetic construct
RLTISVDTSKSQVSLKMSSVTAADTAVYYCAR

SEQ ID NO: 830 - protein, 32 aa, synthetic construct
RLTISVDTSKSQVSLKLSSLTAADTAVYYCAR

SEQ ID NO: 831 - protein, 32 aa, synthetic construct
RLTISVDTSKSQVSLKLSSVQAADTAVYYCAR

SEQ ID NO: 832 - protein, 32 aa, synthetic construct
RLTISVDTSKSQVSLKLSSVTAQDTAVYYCAR

SEQ ID NO: 833 - protein, 32 aa, synthetic construct
RLTISVDTSKSQFSFKMSSVTAADTAVYYCAR

SEQ ID NO: 834 - protein, 32 aa, synthetic construct
RLTISVDTSKSQFSFKLSSLTAADTAVYYCAR

SEQ ID NO: 835 - protein, 32 aa, synthetic construct
RLTISVDTSKSQFSFKLSSVQAADTAVYYCAR

SEQ ID NO: 836 - protein, 32 aa, synthetic construct
RLTISVDTSKSQFSFKLSSVTAQDTAVYYCAR

SEQ ID NO: 837 - protein, 32 aa, synthetic construct
RLTISVDTSKSQFSLKMSSLTAADTAVYYCAR

SEQ ID NO: 838 - protein, 32 aa, synthetic construct
RLTISVDTSKSQFSLKMSSVQAADTAVYYCAR

SEQ ID NO: 839 - protein, 32 aa, synthetic construct
RLTISVDTSKSQFSLKMSSVTAQDTAVYYCAR

SEQ ID NO: 840 - protein, 32 aa, synthetic construct
RLTISVDTSKSQFSLKLSSLQAADTAVYYCAR

SEQ ID NO: 841 - protein, 32 aa, synthetic construct
RLTISVDTSKSQFSLKLSSLTAQDTAVYYCAR

SEQ ID NO: 842 - protein, 32 aa, synthetic construct
RLTISVDTSKSQFSLKLSSVQAQDTAVYYCAR

SEQ ID NO: 843 - protein, 32 aa, synthetic construct
RLTISVDTSKNQVSFKMSSVTAADTAVYYCAR

SEQ ID NO: 844 - protein, 32 aa, synthetic construct
RLTISVDTSKNQVSFKLSSLTAADTAVYYCAR

SEQ ID NO: 845 - protein, 32 aa, synthetic construct
RLTISVDTSKNQVSFKLSSVQAADTAVYYCAR

SEQ ID NO: 846 - protein, 32 aa, synthetic construct
RLTISVDTSKNQVSFKLSSVTAQDTAVYYCAR

SEQ ID NO: 847 - protein, 32 aa, synthetic construct
RLTISVDTSKNQVSLKMSSLTAADTAVYYCAR

SEQ ID NO: 848 - protein, 32 aa, synthetic construct
RLTISVDTSKNQVSLKMSSVQAADTAVYYCAR

SEQ ID NO: 849 - protein, 32 aa, synthetic construct
RLTISVDTSKNQVSLKMSSVTAQDTAVYYCAR

SEQ ID NO: 850 - protein, 32 aa, synthetic construct
RLTISVDTSKNQVSLKLSSLQAADTAVYYCAR

SEQ ID NO: 851 - protein, 32 aa, synthetic construct
RLTISVDTSKNQVSLKLSSLTAQDTAVYYCAR

SEQ ID NO: 852 - protein, 32 aa, synthetic construct
RLTISVDTSKNQVSLKLSSVQAQDTAVYYCAR

SEQ ID NO: 853 - protein, 32 aa, synthetic construct
RLTISVDTSKNQFSFKMSSLTAADTAVYYCAR

SEQ ID NO: 854 - protein, 32 aa, synthetic construct
RLTISVDTSKNQFSFKMSSVQAADTAVYYCAR

SEQ ID NO: 855 - protein, 32 aa, synthetic construct
RLTISVDTSKNQFSFKMSSVTAQDTAVYYCAR

SEQ ID NO: 856 - protein, 32 aa, synthetic construct
RLTISVDTSKNQFSFKLSSLQAADTAVYYCAR

SEQ ID NO: 857 - protein, 32 aa, synthetic construct
RLTISVDTSKNQFSFKLSSLTAQDTAVYYCAR

SEQ ID NO: 858 - protein, 32 aa, synthetic construct
RLTISVDTSKNQFSFKLSSVQAQDTAVYYCAR

SEQ ID NO: 859 - protein, 32 aa, synthetic construct
RLTISVDTSKNQFSLKMSSLQAADTAVYYCAR

SEQ ID NO: 860 - protein, 32 aa, synthetic construct
RLTISVDTSKNQFSLKMSSLTAQDTAVYYCAR

SEQ ID NO: 861 - protein, 32 aa, synthetic construct
RLTISVDTSKNQFSLKMSSVQAQDTAVYYCAR

SEQ ID NO: 862 - protein, 32 aa, synthetic construct
RLTISVDTSKNQFSLKLSSLQAQDTAVYYCAR

SEQ ID NO: 863 - protein, 32 aa, synthetic construct
RVTISKDNSKSQVSLKLSSVTAADTAVYYCAR

SEQ ID NO: 864 - protein, 32 aa, synthetic construct
RVTISKDNSKSQFSFKLSSVTAADTAVYYCAR

SEQ ID NO: 865 - protein, 32 aa, synthetic construct
RVTISKDNSKSQFSLKMSSVTAADTAVYYCAR

SEQ ID NO: 866 - protein, 32 aa, synthetic construct
RVTISKDNSKSQFSLKLSSLTAADTAVYYCAR

SEQ ID NO: 867 - protein, 32 aa, synthetic construct
RVTISKDNSKSQFSLKLSSVQAADTAVYYCAR

SEQ ID NO: 868 - protein, 32 aa, synthetic construct
RVTISKDNSKSQFSLKLSSVTAQDTAVYYCAR

SEQ ID NO: 869 - protein, 32 aa, synthetic construct
RVTISKDNSKNQVSFKLSSVTAADTAVYYCAR

SEQ ID NO: 870 - protein, 32 aa, synthetic construct
RVTISKDNSKNQVSLKMSSVTAADTAVYYCAR

SEQ ID NO: 871 - protein, 32 aa, synthetic construct
RVTISKDNSKNQVSLKLSSLTAADTAVYYCAR

SEQ ID NO: 872 - protein, 32 aa, synthetic construct
RVTISKDNSKNQVSLKLSSVQAADTAVYYCAR

SEQ ID NO: 873 - protein, 32 aa, synthetic construct
RVTISKDNSKNQVSLKLSSVTAQDTAVYYCAR

SEQ ID NO: 874 - protein, 32 aa, synthetic construct
RVTISKDNSKNQFSFKMSSVTAADTAVYYCAR

SEQ ID NO: 875 - protein, 32 aa, synthetic construct
RVTISKDNSKNQFSFKLSSLTAADTAVYYCAR

SEQ ID NO: 876 - protein, 32 aa, synthetic construct
RVTISKDNSKNQFSFKLSSVQAADTAVYYCAR

SEQ ID NO: 877 - protein, 32 aa, synthetic construct
RVTISKDNSKNQFSFKLSSVTAQDTAVYYCAR

SEQ ID NO: 878 - protein, 32 aa, synthetic construct
RVTISKDNSKNQFSLKMSSLTAADTAVYYCAR

SEQ ID NO: 879 - protein, 32 aa, synthetic construct
RVTISKDNSKNQFSLKMSSVQAADTAVYYCAR

SEQ ID NO: 880 - protein, 32 aa, synthetic construct
RVTISKDNSKNQFSLKMSSVTAQDTAVYYCAR

SEQ ID NO: 881 - protein, 32 aa, synthetic construct
RVTISKDNSKNQFSLKLSSLQAADTAVYYCAR

SEQ ID NO: 882 - protein, 32 aa, synthetic construct
RVTISKDNSKNQFSLKLSSLTAQDTAVYYCAR

SEQ ID NO: 883 - protein, 32 aa, synthetic construct
RVTISKDNSKNQFSLKLSSVQAQDTAVYYCAR

SEQ ID NO: 884 - protein, 32 aa, synthetic construct
RVTISKDTSKSQVSFKLSSVTAADTAVYYCAR

SEQ ID NO: 885 - protein, 32 aa, synthetic construct
RVTISKDTSKSQVSLKMSSVTAADTAVYYCAR

SEQ ID NO: 886 - protein, 32 aa, synthetic construct
RVTISKDTSKSQVSLKLSSLTAADTAVYYCAR

SEQ ID NO: 887 - protein, 32 aa, synthetic construct
RVTISKDTSKSQVSLKLSSVQAADTAVYYCAR

SEQ ID NO: 888 - protein, 32 aa, synthetic construct
RVTISKDTSKSQVSLKLSSVTAQDTAVYYCAR

SEQ ID NO: 889 - protein, 32 aa, synthetic construct
RVTISKDTSKSQFSFKMSSVTAADTAVYYCAR

SEQ ID NO: 890 - protein, 32 aa, synthetic construct
RVTISKDTSKSQFSFKLSSLTAADTAVYYCAR

SEQ ID NO: 891 - protein, 32 aa, synthetic construct
RVTISKDTSKSQFSFKLSSVQAADTAVYYCAR

SEQ ID NO: 892 - protein, 32 aa, synthetic construct
RVTISKDTSKSQFSFKLSSVTAQDTAVYYCAR

SEQ ID NO: 893 - protein, 32 aa, synthetic construct
RVTISKDTSKSQFSLKMSSLTAADTAVYYCAR

SEQ ID NO: 894 - protein, 32 aa, synthetic construct
RVTISKDTSKSQFSLKMSSVQAADTAVYYCAR

SEQ ID NO: 895 - protein, 32 aa, synthetic construct
RVTISKDTSKSQFSLKMSSVTAQDTAVYYCAR

SEQ ID NO: 896 - protein, 32 aa, synthetic construct
RVTISKDTSKSQFSLKLSSLQAADTAVYYCAR

SEQ ID NO: 897 - protein, 32 aa, synthetic construct
RVTISKDTSKSQFSLKLSSLTAQDTAVYYCAR

SEQ ID NO: 898 - protein, 32 aa, synthetic construct
RVTISKDTSKSQFSLKLSSVQAQDTAVYYCAR

SEQ ID NO: 899 - protein, 32 aa, synthetic construct
RVTISKDTSKNQVSFKMSSVTAADTAVYYCAR

SEQ ID NO: 900 - protein, 32 aa, synthetic construct
RVTISKDTSKNQVSFKLSSLTAADTAVYYCAR

SEQ ID NO: 901 - protein, 32 aa, synthetic construct
RVTISKDTSKNQVSFKLSSVQAADTAVYYCAR

SEQ ID NO: 902 - protein, 32 aa, synthetic construct
RVTISKDTSKNQVSFKLSSVTAQDTAVYYCAR

SEQ ID NO: 903 - protein, 32 aa, synthetic construct
RVTISKDTSKNQVSLKMSSLTAADTAVYYCAR

SEQ ID NO: 904 - protein, 32 aa, synthetic construct
RVTISKDTSKNQVSLKMSSVQAADTAVYYCAR

SEQ ID NO: 905 - protein, 32 aa, synthetic construct
RVTISKDTSKNQVSLKMSSVTAQDTAVYYCAR

SEQ ID NO: 906 - protein, 32 aa, synthetic construct
RVTISKDTSKNQVSLKLSSLQAADTAVYYCAR

SEQ ID NO: 907 - protein, 32 aa, synthetic construct
RVTISKDTSKNQVSLKLSSLTAQDTAVYYCAR

SEQ ID NO: 908 - protein, 32 aa, synthetic construct
RVTISKDTSKNQVSLKLSSVQAQDTAVYYCAR

SEQ ID NO: 909 - protein, 32 aa, synthetic construct
RVTISKDTSKNQFSFKMSSLTAADTAVYYCAR

SEQ ID NO: 910 - protein, 32 aa, synthetic construct
RVTISKDTSKNQFSFKMSSVQAADTAVYYCAR

SEQ ID NO: 911 - protein, 32 aa, synthetic construct
RVTISKDTSKNQFSFKMSSVTAQDTAVYYCAR

SEQ ID NO: 912 - protein, 32 aa, synthetic construct
RVTISKDTSKNQFSFKLSSLQAADTAVYYCAR

SEQ ID NO: 913 - protein, 32 aa, synthetic construct
RVTISKDTSKNQFSFKLSSLTAQDTAVYYCAR

SEQ ID NO: 914 - protein, 32 aa, synthetic construct
RVTISKDTSKNQFSFKLSSVQAQDTAVYYCAR

SEQ ID NO: 915 - protein, 32 aa, synthetic construct
RVTISKDTSKNQFSLKMSSLQAADTAVYYCAR

SEQ ID NO: 916 - protein, 32 aa, synthetic construct
RVTISKDTSKNQFSLKMSSLTAQDTAVYYCAR

SEQ ID NO: 917 - protein, 32 aa, synthetic construct
RVTISKDTSKNQFSLKMSSVQAQDTAVYYCAR

SEQ ID NO: 918 - protein, 32 aa, synthetic construct
RVTISKDTSKNQFSLKLSSLQAQDTAVYYCAR

SEQ ID NO: 919 - protein, 32 aa, synthetic construct
RVTISVDNSKSQVSFKLSSVTAADTAVYYCAR

SEQ ID NO: 920 - protein, 32 aa, synthetic construct
RVTISVDNSKSQVSLKMSSVTAADTAVYYCAR

SEQ ID NO: 921 - protein, 32 aa, synthetic construct
RVTISVDNSKSQVSLKLSSLTAADTAVYYCAR

SEQ ID NO: 922 - protein, 32 aa, synthetic construct
RVTISVDNSKSQVSLKLSSVQAADTAVYYCAR

SEQ ID NO: 923 - protein, 32 aa, synthetic construct
RVTISVDNSKSQVSLKLSSVTAQDTAVYYCAR

SEQ ID NO: 924 - protein, 32 aa, synthetic construct
RVTISVDNSKSQFSFKMSSVTAADTAVYYCAR

SEQ ID NO: 925 - protein, 32 aa, synthetic construct
RVTISVDNSKSQFSFKLSSLTAADTAVYYCAR

SEQ ID NO: 926 - protein, 32 aa, synthetic construct
RVTISVDNSKSQFSFKLSSVQAADTAVYYCAR

SEQ ID NO: 927 - protein, 32 aa, synthetic construct
RVTISVDNSKSQFSFKLSSVTAQDTAVYYCAR

SEQ ID NO: 928 - protein, 32 aa, synthetic construct
RVTISVDNSKSQFSLKMSSLTAADTAVYYCAR

SEQ ID NO: 929 - protein, 32 aa, synthetic construct
RVTISVDNSKSQFSLKMSSVQAADTAVYYCAR

SEQ ID NO: 930 - protein, 32 aa, synthetic construct
RVTISVDNSKSQFSLKMSSVTAQDTAVYYCAR

SEQ ID NO: 931 - protein, 32 aa, synthetic construct
RVTISVDNSKSQFSLKLSSLQAADTAVYYCAR

SEQ ID NO: 932 - protein, 32 aa, synthetic construct
RVTISVDNSKSQFSLKLSSLTAQDTAVYYCAR

SEQ ID NO: 933 - protein, 32 aa, synthetic construct
RVTISVDNSKSQFSLKLSSVQAQDTAVYYCAR

SEQ ID NO: 934 - protein, 32 aa, synthetic construct
RVTISVDNSKNQVSFKMSSVTAADTAVYYCAR

SEQ ID NO: 935 - protein, 32 aa, synthetic construct
RVTISVDNSKNQVSFKLSSLTAADTAVYYCAR

SEQ ID NO: 936 - protein, 32 aa, synthetic construct
RVTISVDNSKNQVSFKLSSVQAADTAVYYCAR

SEQ ID NO: 937 - protein, 32 aa, synthetic construct
RVTISVDNSKNQVSFKLSSVTAQDTAVYYCAR

SEQ ID NO: 938 - protein, 32 aa, synthetic construct
RVTISVDNSKNQVSLKMSSLTAADTAVYYCAR

SEQ ID NO: 939 - protein, 32 aa, synthetic construct
RVTISVDNSKNQVSLKMSSVQAADTAVYYCAR

SEQ ID NO: 940 - protein, 32 aa, synthetic construct
RVTISVDNSKNQVSLKMSSVTAQDTAVYYCAR

SEQ ID NO: 941 - protein, 32 aa, synthetic construct
RVTISVDNSKNQVSLKLSSLQAADTAVYYCAR

SEQ ID NO: 942 - protein, 32 aa, synthetic construct
RVTISVDNSKNQVSLKLSSLTAQDTAVYYCAR

SEQ ID NO: 943 - protein, 32 aa, synthetic construct
RVTISVDNSKNQVSLKLSSVQAQDTAVYYCAR

SEQ ID NO: 944 - protein, 32 aa, synthetic construct
RVTISVDNSKNQFSFKMSSLTAADTAVYYCAR

SEQ ID NO: 945 - protein, 32 aa, synthetic construct
RVTISVDNSKNQFSFKMSSVQAADTAVYYCAR

SEQ ID NO: 946 - protein, 32 aa, synthetic construct
RVTISVDNSKNQFSFKMSSVTAQDTAVYYCAR

SEQ ID NO: 947 - protein, 32 aa, synthetic construct
RVTISVDNSKNQFSFKLSSLQAADTAVYYCAR

SEQ ID NO: 948 - protein, 32 aa, synthetic construct
RVTISVDNSKNQFSFKLSSLTAQDTAVYYCAR

SEQ ID NO: 949 - protein, 32 aa, synthetic construct
RVTISVDNSKNQFSFKLSSVQAQDTAVYYCAR

SEQ ID NO: 950 - protein, 32 aa, synthetic construct
RVTISVDNSKNQFSLKMSSLQAADTAVYYCAR

SEQ ID NO: 951 - protein, 32 aa, synthetic construct
RVTISVDNSKNQFSLKMSSLTAQDTAVYYCAR

SEQ ID NO: 952 - protein, 32 aa, synthetic construct
RVTISVDNSKNQFSLKMSSVQAQDTAVYYCAR

SEQ ID NO: 953 - protein, 32 aa, synthetic construct
RVTISVDNSKNQFSLKLSSLQAQDTAVYYCAR

SEQ ID NO: 954 - protein, 32 aa, synthetic construct
RVTISVDTSKSQVSFKMSSVTAADTAVYYCAR

SEQ ID NO: 955 - protein, 32 aa, synthetic construct
RVTISVDTSKSQVSFKLSSLTAADTAVYYCAR

SEQ ID NO: 956 - protein, 32 aa, synthetic construct
RVTISVDTSKSQVSFKLSSVQAADTAVYYCAR

SEQ ID NO: 957 - protein, 32 aa, synthetic construct
RVTISVDTSKSQVSFKLSSVTAQDTAVYYCAR

SEQ ID NO: 958 - protein, 32 aa, synthetic construct
RVTISVDTSKSQVSLKMSSLTAADTAVYYCAR

SEQ ID NO: 959 - protein, 32 aa, synthetic construct
RVTISVDTSKSQVSLKMSSVQAADTAVYYCAR

SEQ ID NO: 960 - protein, 32 aa, synthetic construct
RVTISVDTSKSQVSLKMSSVTAQDTAVYYCAR

SEQ ID NO: 961 - protein, 32 aa, synthetic construct
RVTISVDTSKSQVSLKLSSLQAADTAVYYCAR

SEQ ID NO: 962 - protein, 32 aa, synthetic construct
RVTISVDTSKSQVSLKLSSLTAQDTAVYYCAR

SEQ ID NO: 963 - protein, 32 aa, synthetic construct
RVTISVDTSKSQVSLKLSSVQAQDTAVYYCAR

SEQ ID NO: 964 - protein, 32 aa, synthetic construct
RVTISVDTSKSQFSFKMSSLTAADTAVYYCAR

SEQ ID NO: 965 - protein, 32 aa, synthetic construct
RVTISVDTSKSQFSFKMSSVQAADTAVYYCAR

SEQ ID NO: 966 - protein, 32 aa, synthetic construct
RVTISVDTSKSQFSFKMSSVTAQDTAVYYCAR

SEQ ID NO: 967 - protein, 32 aa, synthetic construct
RVTISVDTSKSQFSFKLSSLQAADTAVYYCAR

SEQ ID NO: 968 - protein, 32 aa, synthetic construct
RVTISVDTSKSQFSFKLSSLTAQDTAVYYCAR

SEQ ID NO: 969 - protein, 32 aa, synthetic construct
RVTISVDTSKSQFSFKLSSVQAQDTAVYYCAR

SEQ ID NO: 970 - protein, 32 aa, synthetic construct
RVTISVDTSKSQFSLKMSSLQAADTAVYYCAR

SEQ ID NO: 971 - protein, 32 aa, synthetic construct
RVTISVDTSKSQFSLKMSSLTAQDTAVYYCAR

SEQ ID NO: 972 - protein, 32 aa, synthetic construct
RVTISVDTSKSQFSLKMSSVQAQDTAVYYCAR

SEQ ID NO: 973 - protein, 32 aa, synthetic construct
RVTISVDTSKSQFSLKLSSLQAQDTAVYYCAR

SEQ ID NO: 974 - protein, 32 aa, synthetic construct
RVTISVDTSKNQVSFKMSSLTAADTAVYYCAR

SEQ ID NO: 975 - protein, 32 aa, synthetic construct
RVTISVDTSKNQVSFKMSSVQAADTAVYYCAR

SEQ ID NO: 976 - protein, 32 aa, synthetic construct
RVTISVDTSKNQVSFKMSSVTAQDTAVYYCAR

SEQ ID NO: 977 - protein, 32 aa, synthetic construct
RVTISVDTSKNQVSFKLSSLQAADTAVYYCAR

SEQ ID NO: 978 - protein, 32 aa, synthetic construct
RVTISVDTSKNQVSFKLSSLTAQDTAVYYCAR

SEQ ID NO: 979 - protein, 32 aa, synthetic construct
RVTISVDTSKNQVSFKLSSVQAQDTAVYYCAR

SEQ ID NO: 980 - protein, 32 aa, synthetic construct
RVTISVDTSKNQVSLKMSSLQAADTAVYYCAR

SEQ ID NO: 981 - protein, 32 aa, synthetic construct
RVTISVDTSKNQVSLKMSSLTAQDTAVYYCAR

SEQ ID NO: 982 - protein, 32 aa, synthetic construct
RVTISVDTSKNQVSLKMSSVQAQDTAVYYCAR

SEQ ID NO: 983 - protein, 32 aa, synthetic construct
RVTISVDTSKNQVSLKLSSLQAQDTAVYYCAR

SEQ ID NO: 984 - protein, 32 aa, synthetic construct
RVTISVDTSKNQFSFKMSSLQAADTAVYYCAR

SEQ ID NO: 985 - protein, 32 aa, synthetic construct
RVTISVDTSKNQFSFKMSSLTAQDTAVYYCAR

SEQ ID NO: 986 - protein, 32 aa, synthetic construct
RVTISVDTSKNQFSFKMSSVQAQDTAVYYCAR

SEQ ID NO: 987 - protein, 32 aa, synthetic construct
RVTISVDTSKNQFSFKLSSLQAQDTAVYYCAR

SEQ ID NO: 988 - protein, 32 aa, synthetic construct
RVTISVDTSKNQFSLKMSSLQAQDTAVYYCAR

SEQ ID NO: 989 - protein, 32 aa, synthetic construct
RLTISKDNSKSQVSLKLSSVTAADTAVYYCAR

SEQ ID NO: 990 - protein, 32 aa, synthetic construct
RLTISKDNSKSQFSFKLSSVTAADTAVYYCAR

SEQ ID NO: 991 - protein, 32 aa, synthetic construct
RLTISKDNSKSQFSLKMSSVTAADTAVYYCAR

SEQ ID NO: 992 - protein, 32 aa, synthetic construct
RLTISKDNSKSQFSLKLSSLTAADTAVYYCAR

SEQ ID NO: 993 - protein, 32 aa, synthetic construct
RLTISKDNSKSQFSLKLSSVQAADTAVYYCAR

SEQ ID NO: 994 - protein, 32 aa, synthetic construct
RLTISKDNSKSQFSLKLSSVTAQDTAVYYCAR

SEQ ID NO: 995 - protein, 32 aa, synthetic construct
RLTISKDNSKNQVSFKLSSVTAADTAVYYCAR

SEQ ID NO: 996 - protein, 32 aa, synthetic construct
RLTISKDNSKNQVSLKMSSVTAADTAVYYCAR

SEQ ID NO: 997 - protein, 32 aa, synthetic construct
RLTISKDNSKNQVSLKLSSLTAADTAVYYCAR

SEQ ID NO: 998 - protein, 32 aa, synthetic construct
RLTISKDNSKNQVSLKLSSVQAADTAVYYCAR

SEQ ID NO: 999 - protein, 32 aa, synthetic construct
RLTISKDNSKNQVSLKLSSVTAQDTAVYYCAR

SEQ ID NO: 1000 - protein, 32 aa, synthetic construct
RLTISKDNSKNQFSFKMSSVTAADTAVYYCAR

SEQ ID NO: 1001 - protein, 32 aa, synthetic construct
RLTISKDNSKNQFSFKLSSLTAADTAVYYCAR

SEQ ID NO: 1002 - protein, 32 aa, synthetic construct
RLTISKDNSKNQFSFKLSSVQAADTAVYYCAR

SEQ ID NO: 1003 - protein, 32 aa, synthetic construct
RLTISKDNSKNQFSFKLSSVTAQDTAVYYCAR

SEQ ID NO: 1004 - protein, 32 aa, synthetic construct
RLTISKDNSKNQFSLKMSSLTAADTAVYYCAR

SEQ ID NO: 1005 - protein, 32 aa, synthetic construct
RLTISKDNSKNQFSLKMSSVQAADTAVYYCAR

SEQ ID NO: 1006 - protein, 32 aa, synthetic construct
RLTISKDNSKNQFSLKMSSVTAQDTAVYYCAR

SEQ ID NO: 1007 - protein, 32 aa, synthetic construct
RLTISKDNSKNQFSLKLSSLQAADTAVYYCAR

SEQ ID NO: 1008 - protein, 32 aa, synthetic construct
RLTISKDNSKNQFSLKLSSLTAQDTAVYYCAR

SEQ ID NO: 1009 - protein, 32 aa, synthetic construct
RLTISKDNSKNQFSLKLSSVQAQDTAVYYCAR

SEQ ID NO: 1010 - protein, 32 aa, synthetic construct
RLTISKDTSKSQVSFKLSSVTAADTAVYYCAR

SEQ ID NO: 1011 - protein, 32 aa, synthetic construct
RLTISKDTSKSQVSLKMSSVTAADTAVYYCAR

SEQ ID NO: 1012 - protein, 32 aa, synthetic construct
RLTISKDTSKSQVSLKLSSLTAADTAVYYCAR

SEQ ID NO: 1013 - protein, 32 aa, synthetic construct
RLTISKDTSKSQVSLKLSSVQAADTAVYYCAR

SEQ ID NO: 1014 - protein, 32 aa, synthetic construct
RLTISKDTSKSQVSLKLSSVTAQDTAVYYCAR

SEQ ID NO: 1015 - protein, 32 aa, synthetic construct
RLTISKDTSKSQFSFKMSSVTAADTAVYYCAR

SEQ ID NO: 1016 - protein, 32 aa, synthetic construct
RLTISKDTSKSQFSFKLSSLTAADTAVYYCAR

SEQ ID NO: 1017 - protein, 32 aa, synthetic construct
RLTISKDTSKSQFSFKLSSVQAADTAVYYCAR

SEQ ID NO: 1018 - protein, 32 aa, synthetic construct
RLTISKDTSKSQFSFKLSSVTAQDTAVYYCAR

SEQ ID NO: 1019 - protein, 32 aa, synthetic construct
RLTISKDTSKSQFSLKMSSLTAADTAVYYCAR

SEQ ID NO: 1020 - protein, 32 aa, synthetic construct
RLTISKDTSKSQFSLKMSSVQAADTAVYYCAR

SEQ ID NO: 1021 - protein, 32 aa, synthetic construct
RLTISKDTSKSQFSLKMSSVTAQDTAVYYCAR

SEQ ID NO: 1022 - protein, 32 aa, synthetic construct
RLTISKDTSKSQFSLKLSSLQAADTAVYYCAR

SEQ ID NO: 1023 - protein, 32 aa, synthetic construct
RLTISKDTSKSQFSLKLSSLTAQDTAVYYCAR

SEQ ID NO: 1024 - protein, 32 aa, synthetic construct
RLTISKDTSKSQFSLKLSSVQAQDTAVYYCAR

SEQ ID NO: 1025 - protein, 32 aa, synthetic construct
RLTISKDTSKNQVSFKMSSVTAADTAVYYCAR

SEQ ID NO: 1026 - protein, 32 aa, synthetic construct
RLTISKDTSKNQVSFKLSSLTAADTAVYYCAR

SEQ ID NO: 1027 - protein, 32 aa, synthetic construct
RLTISKDTSKNQVSFKLSSVQAADTAVYYCAR

SEQ ID NO: 1028 - protein, 32 aa, synthetic construct
RLTISKDTSKNQVSFKLSSVTAQDTAVYYCAR

SEQ ID NO: 1029 - protein, 32 aa, synthetic construct
RLTISKDTSKNQVSLKMSSLTAADTAVYYCAR

SEQ ID NO: 1030 - protein, 32 aa, synthetic construct
RLTISKDTSKNQVSLKMSSVQAADTAVYYCAR

SEQ ID NO: 1031 - protein, 32 aa, synthetic construct
RLTISKDTSKNQVSLKMSSVTAQDTAVYYCAR

SEQ ID NO: 1032 - protein, 32 aa, synthetic construct
RLTISKDTSKNQVSLKLSSLQAADTAVYYCAR

SEQ ID NO: 1033 - protein, 32 aa, synthetic construct
RLTISKDTSKNQVSLKLSSLTAQDTAVYYCAR

SEQ ID NO: 1034 - protein, 32 aa, synthetic construct
RLTISKDTSKNQVSLKLSSVQAQDTAVYYCAR

SEQ ID NO: 1035 - protein, 32 aa, synthetic construct
RLTISKDTSKNQFSFKMSSLTAADTAVYYCAR

SEQ ID NO: 1036 - protein, 32 aa, synthetic construct
RLTISKDTSKNQFSFKMSSVQAADTAVYYCAR

SEQ ID NO: 1037 - protein, 32 aa, synthetic construct
RLTISKDTSKNQFSFKMSSVTAQDTAVYYCAR

SEQ ID NO: 1038 - protein, 32 aa, synthetic construct
RLTISKDTSKNQFSFKLSSLQAADTAVYYCAR

SEQ ID NO: 1039 - protein, 32 aa, synthetic construct
RLTISKDTSKNQFSFKLSSLTAQDTAVYYCAR

SEQ ID NO: 1040 - protein, 32 aa, synthetic construct
RLTISKDTSKNQFSFKLSSVQAQDTAVYYCAR

SEQ ID NO: 1041 - protein, 32 aa, synthetic construct
RLTISKDTSKNQFSLKMSSLQAADTAVYYCAR

SEQ ID NO: 1042 - protein, 32 aa, synthetic construct
RLTISKDTSKNQFSLKMSSLTAQDTAVYYCAR

SEQ ID NO: 1043 - protein, 32 aa, synthetic construct
RLTISKDTSKNQFSLKMSSVQAQDTAVYYCAR

SEQ ID NO: 1044 - protein, 32 aa, synthetic construct
RLTISKDTSKNQFSLKLSSLQAQDTAVYYCAR

SEQ ID NO: 1045 - protein, 32 aa, synthetic construct
RLTISVDNSKSQVSFKLSSVTAADTAVYYCAR

SEQ ID NO: 1046 - protein, 32 aa, synthetic construct
RLTISVDNSKSQVSLKMSSVTAADTAVYYCAR

SEQ ID NO: 1047 - protein, 32 aa, synthetic construct
RLTISVDNSKSQVSLKLSSLTAADTAVYYCAR

SEQ ID NO: 1048 - protein, 32 aa, synthetic construct
RLTISVDNSKSQVSLKLSSVQAADTAVYYCAR

SEQ ID NO: 1049 - protein, 32 aa, synthetic construct
RLTISVDNSKSQVSLKLSSVTAQDTAVYYCAR

SEQ ID NO: 1050 - protein, 32 aa, synthetic construct
RLTISVDNSKSQFSFKMSSVTAADTAVYYCAR

SEQ ID NO: 1051 - protein, 32 aa, synthetic construct
RLTISVDNSKSQFSFKLSSLTAADTAVYYCAR

SEQ ID NO: 1052 - protein, 32 aa, synthetic construct
RLTISVDNSKSQFSFKLSSVQAADTAVYYCAR

SEQ ID NO: 1053 - protein, 32 aa, synthetic construct
RLTISVDNSKSQFSFKLSSVTAQDTAVYYCAR

SEQ ID NO: 1054 - protein, 32 aa, synthetic construct
RLTISVDNSKSQFSLKMSSLTAADTAVYYCAR

SEQ ID NO: 1055 - protein, 32 aa, synthetic construct
RLTISVDNSKSQFSLKMSSVQAADTAVYYCAR

SEQ ID NO: 1056 - protein, 32 aa, synthetic construct
RLTISVDNSKSQFSLKMSSVTAQDTAVYYCAR

SEQ ID NO: 1057 - protein, 32 aa, synthetic construct
RLTISVDNSKSQFSLKLSSLQAADTAVYYCAR

SEQ ID NO: 1058 - protein, 32 aa, synthetic construct
RLTISVDNSKSQFSLKLSSLTAQDTAVYYCAR

SEQ ID NO: 1059 - protein, 32 aa, synthetic construct
RLTISVDNSKSQFSLKLSSVQAQDTAVYYCAR

SEQ ID NO: 1060 - protein, 32 aa, synthetic construct
RLTISVDNSKNQVSFKMSSVTAADTAVYYCAR

SEQ ID NO: 1061 - protein, 32 aa, synthetic construct
RLTISVDNSKNQVSFKLSSLTAADTAVYYCAR

SEQ ID NO: 1062 - protein, 32 aa, synthetic construct
RLTISVDNSKNQVSFKLSSVQAADTAVYYCAR

SEQ ID NO: 1063 - protein, 32 aa, synthetic construct
RLTISVDNSKNQVSFKLSSVTAQDTAVYYCAR

SEQ ID NO: 1064 - protein, 32 aa, synthetic construct
RLTISVDNSKNQVSLKMSSLTAADTAVYYCAR

SEQ ID NO: 1065 - protein, 32 aa, synthetic construct
RLTISVDNSKNQVSLKMSSVQAADTAVYYCAR

SEQ ID NO: 1066 - protein, 32 aa, synthetic construct
RLTISVDNSKNQVSLKMSSVTAQDTAVYYCAR

SEQ ID NO: 1067 - protein, 32 aa, synthetic construct
RLTISVDNSKNQVSLKLSSLQAADTAVYYCAR

SEQ ID NO: 1068 - protein, 32 aa, synthetic construct
RLTISVDNSKNQVSLKLSSLTAQDTAVYYCAR

SEQ ID NO: 1069 - protein, 32 aa, synthetic construct
RLTISVDNSKNQVSLKLSSVQAQDTAVYYCAR

SEQ ID NO: 1070 - protein, 32 aa, synthetic construct
RLTISVDNSKNQFSFKMSSLTAADTAVYYCAR

SEQ ID NO: 1071 - protein, 32 aa, synthetic construct
RLTISVDNSKNQFSFKMSSVQAADTAVYYCAR

SEQ ID NO: 1072 - protein, 32 aa, synthetic construct
RLTISVDNSKNQFSFKMSSVTAQDTAVYYCAR

SEQ ID NO: 1073 - protein, 32 aa, synthetic construct
RLTISVDNSKNQFSFKLSSLQAADTAVYYCAR

SEQ ID NO: 1074 - protein, 32 aa, synthetic construct
RLTISVDNSKNQFSFKLSSLTAQDTAVYYCAR

SEQ ID NO: 1075 - protein, 32 aa, synthetic construct
RLTISVDNSKNQFSFKLSSVQAQDTAVYYCAR

SEQ ID NO: 1076 - protein, 32 aa, synthetic construct
RLTISVDNSKNQFSLKMSSLQAADTAVYYCAR

SEQ ID NO: 1077 - protein, 32 aa, synthetic construct
RLTISVDNSKNQFSLKMSSLTAQDTAVYYCAR

SEQ ID NO: 1078 - protein, 32 aa, synthetic construct
RLTISVDNSKNQFSLKMSSVQAQDTAVYYCAR

SEQ ID NO: 1079 - protein, 32 aa, synthetic construct
RLTISVDNSKNQFSLKLSSLQAQDTAVYYCAR

SEQ ID NO: 1080 - protein, 32 aa, synthetic construct
RLTISVDTSKSQVSFKMSSVTAADTAVYYCAR

SEQ ID NO: 1081 - protein, 32 aa, synthetic construct
RLTISVDTSKSQVSFKLSSLTAADTAVYYCAR

SEQ ID NO: 1082 - protein, 32 aa, synthetic construct
RLTISVDTSKSQVSFKLSSVQAADTAVYYCAR

SEQ ID NO: 1083 - protein, 32 aa, synthetic construct
RLTISVDTSKSQVSFKLSSVTAQDTAVYYCAR

SEQ ID NO: 1084 - protein, 32 aa, synthetic construct
RLTISVDTSKSQVSLKMSSLTAADTAVYYCAR

SEQ ID NO: 1085 - protein, 32 aa, synthetic construct
RLTISVDTSKSQVSLKMSSVQAADTAVYYCAR

SEQ ID NO: 1086 - protein, 32 aa, synthetic construct
RLTISVDTSKSQVSLKMSSVTAQDTAVYYCAR

SEQ ID NO: 1087 - protein, 32 aa, synthetic construct
RLTISVDTSKSQVSLKLSSLQAADTAVYYCAR

SEQ ID NO: 1088 - protein, 32 aa, synthetic construct
RLTISVDTSKSQVSLKLSSLTAQDTAVYYCAR

SEQ ID NO: 1089 - protein, 32 aa, synthetic construct
RLTISVDTSKSQVSLKLSSVQAQDTAVYYCAR

SEQ ID NO: 1090 - protein, 32 aa, synthetic construct
RLTISVDTSKSQFSFKMSSLTAADTAVYYCAR

SEQ ID NO: 1091 - protein, 32 aa, synthetic construct
RLTISVDTSKSQFSFKMSSVQAADTAVYYCAR

SEQ ID NO: 1092 - protein, 32 aa, synthetic construct
RLTISVDTSKSQFSFKMSSVTAQDTAVYYCAR

SEQ ID NO: 1093 - protein, 32 aa, synthetic construct
RLTISVDTSKSQFSFKLSSLQAADTAVYYCAR

SEQ ID NO: 1094 - protein, 32 aa, synthetic construct
RLTISVDTSKSQFSFKLSSLTAQDTAVYYCAR

SEQ ID NO: 1095 - protein, 32 aa, synthetic construct
RLTISVDTSKSQFSFKLSSVQAQDTAVYYCAR

SEQ ID NO: 1096 - protein, 32 aa, synthetic construct
RLTISVDTSKSQFSLKMSSLQAADTAVYYCAR

SEQ ID NO: 1097 - protein, 32 aa, synthetic construct
RLTISVDTSKSQFSLKMSSLTAQDTAVYYCAR

SEQ ID NO: 1098 - protein, 32 aa, synthetic construct
RLTISVDTSKSQFSLKMSSVQAQDTAVYYCAR

SEQ ID NO: 1099 - protein, 32 aa, synthetic construct
RLTISVDTSKSQFSLKLSSLQAQDTAVYYCAR

SEQ ID NO: 1100 - protein, 32 aa, synthetic construct
RLTISVDTSKNQVSFKMSSLTAADTAVYYCAR

SEQ ID NO: 1101 - protein, 32 aa, synthetic construct
RLTISVDTSKNQVSFKMSSVQAADTAVYYCAR

SEQ ID NO: 1102 - protein, 32 aa, synthetic construct
RLTISVDTSKNQVSFKMSSVTAQDTAVYYCAR

SEQ ID NO: 1103 - protein, 32 aa, synthetic construct
RLTISVDTSKNQVSFKLSSLQAADTAVYYCAR

SEQ ID NO: 1104 - protein, 32 aa, synthetic construct
RLTISVDTSKNQVSFKLSSLTAQDTAVYYCAR

SEQ ID NO: 1105 - protein, 32 aa, synthetic construct
RLTISVDTSKNQVSFKLSSVQAQDTAVYYCAR

SEQ ID NO: 1106 - protein, 32 aa, synthetic construct
RLTISVDTSKNQVSLKMSSLQAADTAVYYCAR

SEQ ID NO: 1107 - protein, 32 aa, synthetic construct
RLTISVDTSKNQVSLKMSSLTAQDTAVYYCAR

SEQ ID NO: 1108 - protein, 32 aa, synthetic construct
RLTISVDTSKNQVSLKMSSVQAQDTAVYYCAR

SEQ ID NO: 1109 - protein, 32 aa, synthetic construct
RLTISVDTSKNQVSLKLSSLQAQDTAVYYCAR

SEQ ID NO: 1110 - protein, 32 aa, synthetic construct
RLTISVDTSKNQFSFKMSSLQAADTAVYYCAR

SEQ ID NO: 1111 - protein, 32 aa, synthetic construct
RLTISVDTSKNQFSFKMSSLTAQDTAVYYCAR

SEQ ID NO: 1112 - protein, 32 aa, synthetic construct
RLTISVDTSKNQFSFKMSSVQAQDTAVYYCAR

SEQ ID NO: 1113 - protein, 32 aa, synthetic construct
RLTISVDTSKNQFSFKLSSLQAQDTAVYYCAR

SEQ ID NO: 1114 - protein, 32 aa, synthetic construct
RLTISVDTSKNQFSLKMSSLQAQDTAVYYCAR

SEQ ID NO: 1115 - protein, 32 aa, synthetic construct
RVTISKDNSKSQVSFKLSSVTAADTAVYYCAR

SEQ ID NO: 1116 - protein, 32 aa, synthetic construct
RVTISKDNSKSQVSLKMSSVTAADTAVYYCAR

SEQ ID NO: 1117 - protein, 32 aa, synthetic construct
RVTISKDNSKSQVSLKLSSLTAADTAVYYCAR

SEQ ID NO: 1118 - protein, 32 aa, synthetic construct
RVTISKDNSKSQVSLKLSSVQAADTAVYYCAR

SEQ ID NO: 1119 - protein, 32 aa, synthetic construct
RVTISKDNSKSQVSLKLSSVTAQDTAVYYCAR

SEQ ID NO: 1120 - protein, 32 aa, synthetic construct
RVTISKDNSKSQFSFKMSSVTAADTAVYYCAR

SEQ ID NO: 1121 - protein, 32 aa, synthetic construct
RVTISKDNSKSQFSFKLSSLTAADTAVYYCAR

SEQ ID NO: 1122 - protein, 32 aa, synthetic construct
RVTISKDNSKSQFSFKLSSVQAADTAVYYCAR

SEQ ID NO: 1123 - protein, 32 aa, synthetic construct
RVTISKDNSKSQFSFKLSSVTAQDTAVYYCAR

SEQ ID NO: 1124 - protein, 32 aa, synthetic construct
RVTISKDNSKSQFSLKMSSLTAADTAVYYCAR

SEQ ID NO: 1125 - protein, 32 aa, synthetic construct
RVTISKDNSKSQFSLKMSSVQAADTAVYYCAR

SEQ ID NO: 1126 - protein, 32 aa, synthetic construct
RVTISKDNSKSQFSLKMSSVTAQDTAVYYCAR

SEQ ID NO: 1127 - protein, 32 aa, synthetic construct
RVTISKDNSKSQFSLKLSSLQAADTAVYYCAR

SEQ ID NO: 1128 - protein, 32 aa, synthetic construct
RVTISKDNSKSQFSLKLSSLTAQDTAVYYCAR

SEQ ID NO: 1129 - protein, 32 aa, synthetic construct
RVTISKDNSKSQFSLKLSSVQAQDTAVYYCAR

SEQ ID NO: 1130 - protein, 32 aa, synthetic construct
RVTISKDNSKNQVSFKMSSVTAADTAVYYCAR

SEQ ID NO: 1131 - protein, 32 aa, synthetic construct
RVTISKDNSKNQVSFKLSSLTAADTAVYYCAR

SEQ ID NO: 1132 - protein, 32 aa, synthetic construct
RVTISKDNSKNQVSFKLSSVQAADTAVYYCAR

SEQ ID NO: 1133 - protein, 32 aa, synthetic construct
RVTISKDNSKNQVSFKLSSVTAQDTAVYYCAR

SEQ ID NO: 1134 - protein, 32 aa, synthetic construct
RVTISKDNSKNQVSLKMSSLTAADTAVYYCAR

SEQ ID NO: 1135 - protein, 32 aa, synthetic construct
RVTISKDNSKNQVSLKMSSVQAADTAVYYCAR

SEQ ID NO: 1136 - protein, 32 aa, synthetic construct
RVTISKDNSKNQVSLKMSSVTAQDTAVYYCAR

SEQ ID NO: 1137 - protein, 32 aa, synthetic construct
RVTISKDNSKNQVSLKLSSLQAADTAVYYCAR

SEQ ID NO: 1138 - protein, 32 aa, synthetic construct
RVTISKDNSKNQVSLKLSSLTAQDTAVYYCAR

SEQ ID NO: 1139 - protein, 32 aa, synthetic construct
RVTISKDNSKNQVSLKLSSVQAQDTAVYYCAR

SEQ ID NO: 1140 - protein, 32 aa, synthetic construct
RVTISKDNSKNQFSFKMSSLTAADTAVYYCAR

SEQ ID NO: 1141 - protein, 32 aa, synthetic construct
RVTISKDNSKNQFSFKMSSVQAADTAVYYCAR

SEQ ID NO: 1142 - protein, 32 aa, synthetic construct
RVTISKDNSKNQFSFKMSSVTAQDTAVYYCAR

SEQ ID NO: 1143 - protein, 32 aa, synthetic construct
RVTISKDNSKNQFSFKLSSLQAADTAVYYCAR

SEQ ID NO: 1144 - protein, 32 aa, synthetic construct
RVTISKDNSKNQFSFKLSSLTAQDTAVYYCAR

SEQ ID NO: 1145 - protein, 32 aa, synthetic construct
RVTISKDNSKNQFSFKLSSVQAQDTAVYYCAR

SEQ ID NO: 1146 - protein, 32 aa, synthetic construct
RVTISKDNSKNQFSLKMSSLQAADTAVYYCAR

SEQ ID NO: 1147 - protein, 32 aa, synthetic construct
RVTISKDNSKNQFSLKMSSLTAQDTAVYYCAR

SEQ ID NO: 1148 - protein, 32 aa, synthetic construct
RVTISKDNSKNQFSLKMSSVQAQDTAVYYCAR

SEQ ID NO: 1149 - protein, 32 aa, synthetic construct
RVTISKDNSKNQFSLKLSSLQAQDTAVYYCAR

SEQ ID NO: 1150 - protein, 32 aa, synthetic construct
RVTISKDTSKSQVSFKMSSVTAADTAVYYCAR

SEQ ID NO: 1151 - protein, 32 aa, synthetic construct
RVTISKDTSKSQVSFKLSSLTAADTAVYYCAR

SEQ ID NO: 1152 - protein, 32 aa, synthetic construct
RVTISKDTSKSQVSFKLSSVQAADTAVYYCAR

SEQ ID NO: 1153 - protein, 32 aa, synthetic construct
RVTISKDTSKSQVSFKLSSVTAQDTAVYYCAR

SEQ ID NO: 1154 - protein, 32 aa, synthetic construct
RVTISKDTSKSQVSLKMSSLTAADTAVYYCAR

SEQ ID NO: 1155 - protein, 32 aa, synthetic construct
RVTISKDTSKSQVSLKMSSVQAADTAVYYCAR

SEQ ID NO: 1156 - protein, 32 aa, synthetic construct
RVTISKDTSKSQVSLKMSSVTAQDTAVYYCAR

SEQ ID NO: 1157 - protein, 32 aa, synthetic construct
RVTISKDTSKSQVSLKLSSLQAADTAVYYCAR

SEQ ID NO: 1158 - protein, 32 aa, synthetic construct
RVTISKDTSKSQVSLKLSSLTAQDTAVYYCAR

SEQ ID NO: 1159 - protein, 32 aa, synthetic construct
RVTISKDTSKSQVSLKLSSVQAQDTAVYYCAR

SEQ ID NO: 1160 - protein, 32 aa, synthetic construct
RVTISKDTSKSQFSFKMSSLTAADTAVYYCAR

SEQ ID NO: 1161 - protein, 32 aa, synthetic construct
RVTISKDTSKSQFSFKMSSVQAADTAVYYCAR

SEQ ID NO: 1162 - protein, 32 aa, synthetic construct
RVTISKDTSKSQFSFKMSSVTAQDTAVYYCAR

SEQ ID NO: 1163 - protein, 32 aa, synthetic construct
RVTISKDTSKSQFSFKLSSLQAADTAVYYCAR

SEQ ID NO: 1164 - protein, 32 aa, synthetic construct
RVTISKDTSKSQFSFKLSSLTAQDTAVYYCAR

SEQ ID NO: 1165 - protein, 32 aa, synthetic construct
RVTISKDTSKSQFSFKLSSVQAQDTAVYYCAR

SEQ ID NO: 1166 - protein, 32 aa, synthetic construct
RVTISKDTSKSQFSLKMSSLQAADTAVYYCAR

SEQ ID NO: 1167 - protein, 32 aa, synthetic construct
RVTISKDTSKSQFSLKMSSLTAQDTAVYYCAR

SEQ ID NO: 1168 - protein, 32 aa, synthetic construct
RVTISKDTSKSQFSLKMSSVQAQDTAVYYCAR

SEQ ID NO: 1169 - protein, 32 aa, synthetic construct
RVTISKDTSKSQFSLKLSSLQAQDTAVYYCAR

SEQ ID NO: 1170 - protein, 32 aa, synthetic construct
RVTISKDTSKNQVSFKMSSLTAADTAVYYCAR

SEQ ID NO: 1171 - protein, 32 aa, synthetic construct
RVTISKDTSKNQVSFKMSSVQAADTAVYYCAR

SEQ ID NO: 1172 - protein, 32 aa, synthetic construct
RVTISKDTSKNQVSFKMSSVTAQDTAVYYCAR

SEQ ID NO: 1173 - protein, 32 aa, synthetic construct
RVTISKDTSKNQVSFKLSSLQAADTAVYYCAR

SEQ ID NO: 1174 - protein, 32 aa, synthetic construct
RVTISKDTSKNQVSFKLSSLTAQDTAVYYCAR

SEQ ID NO: 1175 - protein, 32 aa, synthetic construct
RVTISKDTSKNQVSFKLSSVQAQDTAVYYCAR

SEQ ID NO: 1176 - protein, 32 aa, synthetic construct
RVTISKDTSKNQVSLKMSSLQAADTAVYYCAR

SEQ ID NO: 1177 - protein, 32 aa, synthetic construct
RVTISKDTSKNQVSLKMSSLTAQDTAVYYCAR

SEQ ID NO: 1178 - protein, 32 aa, synthetic construct
RVTISKDTSKNQVSLKMSSVQAQDTAVYYCAR

SEQ ID NO: 1179 - protein, 32 aa, synthetic construct
RVTISKDTSKNQVSLKLSSLQAQDTAVYYCAR

SEQ ID NO: 1180 - protein, 32 aa, synthetic construct
RVTISKDTSKNQFSFKMSSLQAADTAVYYCAR

SEQ ID NO: 1181 - protein, 32 aa, synthetic construct
RVTISKDTSKNQFSFKMSSLTAQDTAVYYCAR

SEQ ID NO: 1182 - protein, 32 aa, synthetic construct
RVTISKDTSKNQFSFKMSSVQAQDTAVYYCAR

SEQ ID NO: 1183 - protein, 32 aa, synthetic construct
RVTISKDTSKNQFSFKLSSLQAQDTAVYYCAR

SEQ ID NO: 1184 - protein, 32 aa, synthetic construct
RVTISKDTSKNQFSLKMSSLQAQDTAVYYCAR

SEQ ID NO: 1185 - protein, 32 aa, synthetic construct
RVTISVDNSKSQVSFKMSSVTAADTAVYYCAR

SEQ ID NO: 1186 - protein, 32 aa, synthetic construct
RVTISVDNSKSQVSFKLSSLTAADTAVYYCAR

SEQ ID NO: 1187 - protein, 32 aa, synthetic construct
RVTISVDNSKSQVSFKLSSVQAADTAVYYCAR

SEQ ID NO: 1188 - protein, 32 aa, synthetic construct
RVTISVDNSKSQVSFKLSSVTAQDTAVYYCAR

SEQ ID NO: 1189 - protein, 32 aa, synthetic construct
RVTISVDNSKSQVSLKMSSLTAADTAVYYCAR

SEQ ID NO: 1190 - protein, 32 aa, synthetic construct
RVTISVDNSKSQVSLKMSSVQAADTAVYYCAR

SEQ ID NO: 1191 - protein, 32 aa, synthetic construct
RVTISVDNSKSQVSLKMSSVTAQDTAVYYCAR

SEQ ID NO: 1192 - protein, 32 aa, synthetic construct
RVTISVDNSKSQVSLKLSSLQAADTAVYYCAR

SEQ ID NO: 1193 - protein, 32 aa, synthetic construct
RVTISVDNSKSQVSLKLSSLTAQDTAVYYCAR

SEQ ID NO: 1194 - protein, 32 aa, synthetic construct
RVTISVDNSKSQVSLKLSSVQAQDTAVYYCAR

SEQ ID NO: 1195 - protein, 32 aa, synthetic construct
RVTISVDNSKSQFSFKMSSLTAADTAVYYCAR

SEQ ID NO: 1196 - protein, 32 aa, synthetic construct
RVTISVDNSKSQFSFKMSSVQAADTAVYYCAR

SEQ ID NO: 1197 - protein, 32 aa, synthetic construct
RVTISVDNSKSQFSFKMSSVTAQDTAVYYCAR

SEQ ID NO: 1198 - protein, 32 aa, synthetic construct
RVTISVDNSKSQFSFKLSSLQAADTAVYYCAR

SEQ ID NO: 1199 - protein, 32 aa, synthetic construct
RVTISVDNSKSQFSFKLSSLTAQDTAVYYCAR

SEQ ID NO: 1200 - protein, 32 aa, synthetic construct
RVTISVDNSKSQFSFKLSSVQAQDTAVYYCAR

SEQ ID NO: 1201 - protein, 32 aa, synthetic construct
RVTISVDNSKSQFSLKMSSLQAADTAVYYCAR

SEQ ID NO: 1202 - protein, 32 aa, synthetic construct
RVTISVDNSKSQFSLKMSSLTAQDTAVYYCAR

SEQ ID NO: 1203 - protein, 32 aa, synthetic construct
RVTISVDNSKSQFSLKMSSVQAQDTAVYYCAR

SEQ ID NO: 1204 - protein, 32 aa, synthetic construct
RVTISVDNSKSQFSLKLSSLQAQDTAVYYCAR

SEQ ID NO: 1205 - protein, 32 aa, synthetic construct
RVTISVDNSKNQVSFKMSSLTAADTAVYYCAR

SEQ ID NO: 1206 - protein, 32 aa, synthetic construct
RVTISVDNSKNQVSFKMSSVQAADTAVYYCAR

SEQ ID NO: 1207 - protein, 32 aa, synthetic construct
RVTISVDNSKNQVSFKMSSVTAQDTAVYYCAR

SEQ ID NO: 1208 - protein, 32 aa, synthetic construct
RVTISVDNSKNQVSFKLSSLQAADTAVYYCAR

SEQ ID NO: 1209 - protein, 32 aa, synthetic construct
RVTISVDNSKNQVSFKLSSLTAQDTAVYYCAR

SEQ ID NO: 1210 - protein, 32 aa, synthetic construct
RVTISVDNSKNQVSFKLSSVQAQDTAVYYCAR

SEQ ID NO: 1211 - protein, 32 aa, synthetic construct
RVTISVDNSKNQVSLKMSSLQAADTAVYYCAR

SEQ ID NO: 1212 - protein, 32 aa, synthetic construct
RVTISVDNSKNQVSLKMSSLTAQDTAVYYCAR

SEQ ID NO: 1213 - protein, 32 aa, synthetic construct
RVTISVDNSKNQVSLKMSSVQAQDTAVYYCAR

SEQ ID NO: 1214 - protein, 32 aa, synthetic construct
RVTISVDNSKNQVSLKLSSLQAQDTAVYYCAR

SEQ ID NO: 1215 - protein, 32 aa, synthetic construct
RVTISVDNSKNQFSFKMSSLQAADTAVYYCAR

SEQ ID NO: 1216 - protein, 32 aa, synthetic construct
RVTISVDNSKNQFSFKMSSLTAQDTAVYYCAR

SEQ ID NO: 1217 - protein, 32 aa, synthetic construct
RVTISVDNSKNQFSFKMSSVQAQDTAVYYCAR

SEQ ID NO: 1218 - protein, 32 aa, synthetic construct
RVTISVDNSKNQFSFKLSSLQAQDTAVYYCAR

SEQ ID NO: 1219 - protein, 32 aa, synthetic construct
RVTISVDNSKNQFSLKMSSLQAQDTAVYYCAR

SEQ ID NO: 1220 - protein, 32 aa, synthetic construct
RVTISVDTSKSQVSFKMSSLTAADTAVYYCAR

SEQ ID NO: 1221 - protein, 32 aa, synthetic construct
RVTISVDTSKSQVSFKMSSVQAADTAVYYCAR

SEQ ID NO: 1222 - protein, 32 aa, synthetic construct
RVTISVDTSKSQVSFKMSSVTAQDTAVYYCAR

SEQ ID NO: 1223 - protein, 32 aa, synthetic construct
RVTISVDTSKSQVSFKLSSLQAADTAVYYCAR

SEQ ID NO: 1224 - protein, 32 aa, synthetic construct
RVTISVDTSKSQVSFKLSSLTAQDTAVYYCAR

SEQ ID NO: 1225 - protein, 32 aa, synthetic construct
RVTISVDTSKSQVSFKLSSVQAQDTAVYYCAR

SEQ ID NO: 1226 - protein, 32 aa, synthetic construct
RVTISVDTSKSQVSLKMSSLQAADTAVYYCAR

SEQ ID NO: 1227 - protein, 32 aa, synthetic construct
RVTISVDTSKSQVSLKMSSLTAQDTAVYYCAR

SEQ ID NO: 1228 - protein, 32 aa, synthetic construct
RVTISVDTSKSQVSLKMSSVQAQDTAVYYCAR

SEQ ID NO: 1229 - protein, 32 aa, synthetic construct
RVTISVDTSKSQVSLKLSSLQAQDTAVYYCAR

SEQ ID NO: 1230 - protein, 32 aa, synthetic construct
RVTISVDTSKSQFSFKMSSLQAADTAVYYCAR

SEQ ID NO: 1231 - protein, 32 aa, synthetic construct
RVTISVDTSKSQFSFKMSSLTAQDTAVYYCAR

SEQ ID NO: 1232 - protein, 32 aa, synthetic construct
RVTISVDTSKSQFSFKMSSVQAQDTAVYYCAR

SEQ ID NO: 1233 - protein, 32 aa, synthetic construct
RVTISVDTSKSQFSFKLSSLQAQDTAVYYCAR

SEQ ID NO: 1234 - protein, 32 aa, synthetic construct
RVTISVDTSKSQFSLKMSSLQAQDTAVYYCAR

SEQ ID NO: 1235 - protein, 32 aa, synthetic construct
RVTISVDTSKNQVSFKMSSLQAADTAVYYCAR

SEQ ID NO: 1236 - protein, 32 aa, synthetic construct
RVTISVDTSKNQVSFKMSSLTAQDTAVYYCAR

SEQ ID NO: 1237 - protein, 32 aa, synthetic construct
RVTISVDTSKNQVSFKMSSVQAQDTAVYYCAR

SEQ ID NO: 1238 - protein, 32 aa, synthetic construct
RVTISVDTSKNQVSFKLSSLQAQDTAVYYCAR

SEQ ID NO: 1239 - protein, 32 aa, synthetic construct
RVTISVDTSKNQVSLKMSSLQAQDTAVYYCAR

SEQ ID NO: 1240 - protein, 32 aa, synthetic construct
RVTISVDTSKNQFSFKMSSLQAQDTAVYYCAR

SEQ ID NO: 1241 - protein, 32 aa, synthetic construct
RLTISKDNSKSQVSFKLSSVTAADTAVYYCAR

SEQ ID NO: 1242 - protein, 32 aa, synthetic construct
RLTISKDNSKSQVSLKMSSVTAADTAVYYCAR

SEQ ID NO: 1243 - protein, 32 aa, synthetic construct
RLTISKDNSKSQVSLKLSSLTAADTAVYYCAR

SEQ ID NO: 1244 - protein, 32 aa, synthetic construct
RLTISKDNSKSQVSLKLSSVQAADTAVYYCAR

SEQ ID NO: 1245 - protein, 32 aa, synthetic construct
RLTISKDNSKSQVSLKLSSVTAQDTAVYYCAR

SEQ ID NO: 1246 - protein, 32 aa, synthetic construct
RLTISKDNSKSQFSFKMSSVTAADTAVYYCAR

SEQ ID NO: 1247 - protein, 32 aa, synthetic construct
RLTISKDNSKSQFSFKLSSLTAADTAVYYCAR

SEQ ID NO: 1248 - protein, 32 aa, synthetic construct
RLTISKDNSKSQFSFKLSSVQAADTAVYYCAR

SEQ ID NO: 1249 - protein, 32 aa, synthetic construct
RLTISKDNSKSQFSFKLSSVTAQDTAVYYCAR

SEQ ID NO: 1250 - protein, 32 aa, synthetic construct
RLTISKDNSKSQFSLKMSSLTAADTAVYYCAR

SEQ ID NO: 1251 - protein, 32 aa, synthetic construct
RLTISKDNSKSQFSLKMSSVQAADTAVYYCAR

SEQ ID NO: 1252 - protein, 32 aa, synthetic construct
RLTISKDNSKSQFSLKMSSVTAQDTAVYYCAR

SEQ ID NO: 1253 - protein, 32 aa, synthetic construct
RLTISKDNSKSQFSLKLSSLQAADTAVYYCAR

SEQ ID NO: 1254 - protein, 32 aa, synthetic construct
RLTISKDNSKSQFSLKLSSLTAQDTAVYYCAR

SEQ ID NO: 1255 - protein, 32 aa, synthetic construct
RLTISKDNSKSQFSLKLSSVQAQDTAVYYCAR

SEQ ID NO: 1256 - protein, 32 aa, synthetic construct
RLTISKDNSKNQVSFKMSSVTAADTAVYYCAR

SEQ ID NO: 1257 - protein, 32 aa, synthetic construct
RLTISKDNSKNQVSFKLSSLTAADTAVYYCAR

SEQ ID NO: 1258 - protein, 32 aa, synthetic construct
RLTISKDNSKNQVSFKLSSVQAADTAVYYCAR

SEQ ID NO: 1259 - protein, 32 aa, synthetic construct
RLTISKDNSKNQVSFKLSSVTAQDTAVYYCAR

SEQ ID NO: 1260 - protein, 32 aa, synthetic construct
RLTISKDNSKNQVSLKMSSLTAADTAVYYCAR

SEQ ID NO: 1261 - protein, 32 aa, synthetic construct
RLTISKDNSKNQVSLKMSSVQAADTAVYYCAR

SEQ ID NO: 1262 - protein, 32 aa, synthetic construct
RLTISKDNSKNQVSLKMSSVTAQDTAVYYCAR

SEQ ID NO: 1263 - protein, 32 aa, synthetic construct
RLTISKDNSKNQVSLKLSSLQAADTAVYYCAR

SEQ ID NO: 1264 - protein, 32 aa, synthetic construct
RLTISKDNSKNQVSLKLSSLTAQDTAVYYCAR

SEQ ID NO: 1265 - protein, 32 aa, synthetic construct
RLTISKDNSKNQVSLKLSSVQAQDTAVYYCAR

SEQ ID NO: 1266 - protein, 32 aa, synthetic construct
RLTISKDNSKNQFSFKMSSLTAADTAVYYCAR

SEQ ID NO: 1267 - protein, 32 aa, synthetic construct
RLTISKDNSKNQFSFKMSSVQAADTAVYYCAR

SEQ ID NO: 1268 - protein, 32 aa, synthetic construct
RLTISKDNSKNQFSFKMSSVTAQDTAVYYCAR

SEQ ID NO: 1269 - protein, 32 aa, synthetic construct
RLTISKDNSKNQFSFKLSSLQAADTAVYYCAR

SEQ ID NO: 1270 - protein, 32 aa, synthetic construct
RLTISKDNSKNQFSFKLSSLTAQDTAVYYCAR

SEQ ID NO: 1271 - protein, 32 aa, synthetic construct
RLTISKDNSKNQFSFKLSSVQAQDTAVYYCAR

SEQ ID NO: 1272 - protein, 32 aa, synthetic construct
RLTISKDNSKNQFSLKMSSLQAADTAVYYCAR

SEQ ID NO: 1273 - protein, 32 aa, synthetic construct
RLTISKDNSKNQFSLKMSSLTAQDTAVYYCAR

SEQ ID NO: 1274 - protein, 32 aa, synthetic construct
RLTISKDNSKNQFSLKMSSVQAQDTAVYYCAR

SEQ ID NO: 1275 - protein, 32 aa, synthetic construct
RLTISKDNSKNQFSLKLSSLQAQDTAVYYCAR

SEQ ID NO: 1276 - protein, 32 aa, synthetic construct
RLTISKDTSKSQVSFKMSSVTAADTAVYYCAR

SEQ ID NO: 1277 - protein, 32 aa, synthetic construct
RLTISKDTSKSQVSFKLSSLTAADTAVYYCAR

SEQ ID NO: 1278 - protein, 32 aa, synthetic construct
RLTISKDTSKSQVSFKLSSVQAADTAVYYCAR

SEQ ID NO: 1279 - protein, 32 aa, synthetic construct
RLTISKDTSKSQVSFKLSSVTAQDTAVYYCAR

SEQ ID NO: 1280 - protein, 32 aa, synthetic construct
RLTISKDTSKSQVSLKMSSLTAADTAVYYCAR

SEQ ID NO: 1281 - protein, 32 aa, synthetic construct
RLTISKDTSKSQVSLKMSSVQAADTAVYYCAR

SEQ ID NO: 1282 - protein, 32 aa, synthetic construct
RLTISKDTSKSQVSLKMSSVTAQDTAVYYCAR

SEQ ID NO: 1283 - protein, 32 aa, synthetic construct
RLTISKDTSKSQVSLKLSSLQAADTAVYYCAR

SEQ ID NO: 1284 - protein, 32 aa, synthetic construct
RLTISKDTSKSQVSLKLSSLTAQDTAVYYCAR

SEQ ID NO: 1285 - protein, 32 aa, synthetic construct
RLTISKDTSKSQVSLKLSSVQAQDTAVYYCAR

SEQ ID NO: 1286 - protein, 32 aa, synthetic construct
RLTISKDTSKSQFSFKMSSLTAADTAVYYCAR

SEQ ID NO: 1287 - protein, 32 aa, synthetic construct
RLTISKDTSKSQFSFKMSSVQAADTAVYYCAR

SEQ ID NO: 1288 - protein, 32 aa, synthetic construct
RLTISKDTSKSQFSFKMSSVTAQDTAVYYCAR

SEQ ID NO: 1289 - protein, 32 aa, synthetic construct
RLTISKDTSKSQFSFKLSSLQAADTAVYYCAR

SEQ ID NO: 1290 - protein, 32 aa, synthetic construct
RLTISKDTSKSQFSFKLSSLTAQDTAVYYCAR

SEQ ID NO: 1291 - protein, 32 aa, synthetic construct
RLTISKDTSKSQFSFKLSSVQAQDTAVYYCAR

SEQ ID NO: 1292 - protein, 32 aa, synthetic construct
RLTISKDTSKSQFSLKMSSLQAADTAVYYCAR

SEQ ID NO: 1293 - protein, 32 aa, synthetic construct
RLTISKDTSKSQFSLKMSSLTAQDTAVYYCAR

SEQ ID NO: 1294 - protein, 32 aa, synthetic construct
RLTISKDTSKSQFSLKMSSVQAQDTAVYYCAR

SEQ ID NO: 1295 - protein, 32 aa, synthetic construct
RLTISKDTSKSQFSLKLSSLQAQDTAVYYCAR

SEQ ID NO: 1296 - protein, 32 aa, synthetic construct
RLTISKDTSKNQVSFKMSSLTAADTAVYYCAR

SEQ ID NO: 1297 - protein, 32 aa, synthetic construct
RLTISKDTSKNQVSFKMSSVQAADTAVYYCAR

SEQ ID NO: 1298 - protein, 32 aa, synthetic construct
RLTISKDTSKNQVSFKMSSVTAQDTAVYYCAR

SEQ ID NO: 1299 - protein, 32 aa, synthetic construct
RLTISKDTSKNQVSFKLSSLQAADTAVYYCAR

SEQ ID NO: 1300 - protein, 32 aa, synthetic construct
RLTISKDTSKNQVSFKLSSLTAQDTAVYYCAR

SEQ ID NO: 1301 - protein, 32 aa, synthetic construct
RLTISKDTSKNQVSFKLSSVQAQDTAVYYCAR

SEQ ID NO: 1302 - protein, 32 aa, synthetic construct
RLTISKDTSKNQVSLKMSSLQAADTAVYYCAR

SEQ ID NO: 1303 - protein, 32 aa, synthetic construct
RLTISKDTSKNQVSLKMSSLTAQDTAVYYCAR

SEQ ID NO: 1304 - protein, 32 aa, synthetic construct
RLTISKDTSKNQVSLKMSSVQAQDTAVYYCAR

SEQ ID NO: 1305 - protein, 32 aa, synthetic construct
RLTISKDTSKNQVSLKLSSLQAQDTAVYYCAR

SEQ ID NO: 1306 - protein, 32 aa, synthetic construct
RLTISKDTSKNQFSFKMSSLQAADTAVYYCAR

SEQ ID NO: 1307 - protein, 32 aa, synthetic construct
RLTISKDTSKNQFSFKMSSLTAQDTAVYYCAR

SEQ ID NO: 1308 - protein, 32 aa, synthetic construct
RLTISKDTSKNQFSFKMSSVQAQDTAVYYCAR

SEQ ID NO: 1309 - protein, 32 aa, synthetic construct
RLTISKDTSKNQFSFKLSSLQAQDTAVYYCAR

SEQ ID NO: 1310 - protein, 32 aa, synthetic construct
RLTISKDTSKNQFSLKMSSLQAQDTAVYYCAR

SEQ ID NO: 1311 - protein, 32 aa, synthetic construct
RLTISVDNSKSQVSFKMSSVTAADTAVYYCAR

SEQ ID NO: 1312 - protein, 32 aa, synthetic construct
RLTISVDNSKSQVSFKLSSLTAADTAVYYCAR

SEQ ID NO: 1313 - protein, 32 aa, synthetic construct
RLTISVDNSKSQVSFKLSSVQAADTAVYYCAR

SEQ ID NO: 1314 - protein, 32 aa, synthetic construct
RLTISVDNSKSQVSFKLSSVTAQDTAVYYCAR

SEQ ID NO: 1315 - protein, 32 aa, synthetic construct
RLTISVDNSKSQVSLKMSSLTAADTAVYYCAR

SEQ ID NO: 1316 - protein, 32 aa, synthetic construct
RLTISVDNSKSQVSLKMSSVQAADTAVYYCAR

SEQ ID NO: 1317 - protein, 32 aa, synthetic construct
RLTISVDNSKSQVSLKMSSVTAQDTAVYYCAR

SEQ ID NO: 1318 - protein, 32 aa, synthetic construct
RLTISVDNSKSQVSLKLSSLQAADTAVYYCAR

SEQ ID NO: 1319 - protein, 32 aa, synthetic construct
RLTISVDNSKSQVSLKLSSLTAQDTAVYYCAR

SEQ ID NO: 1320 - protein, 32 aa, synthetic construct
RLTISVDNSKSQVSLKLSSVQAQDTAVYYCAR

SEQ ID NO: 1321 - protein, 32 aa, synthetic construct
RLTISVDNSKSQFSFKMSSLTAADTAVYYCAR

SEQ ID NO: 1322 - protein, 32 aa, synthetic construct
RLTISVDNSKSQFSFKMSSVQAADTAVYYCAR

SEQ ID NO: 1323 - protein, 32 aa, synthetic construct
RLTISVDNSKSQFSFKMSSVTAQDTAVYYCAR

SEQ ID NO: 1324 - protein, 32 aa, synthetic construct
RLTISVDNSKSQFSFKLSSLQAADTAVYYCAR

SEQ ID NO: 1325 - protein, 32 aa, synthetic construct
RLTISVDNSKSQFSFKLSSLTAQDTAVYYCAR

SEQ ID NO: 1326 - protein, 32 aa, synthetic construct
RLTISVDNSKSQFSFKLSSVQAQDTAVYYCAR

SEQ ID NO: 1327 - protein, 32 aa, synthetic construct
RLTISVDNSKSQFSLKMSSLQAADTAVYYCAR

SEQ ID NO: 1328 - protein, 32 aa, synthetic construct
RLTISVDNSKSQFSLKMSSLTAQDTAVYYCAR

SEQ ID NO: 1329 - protein, 32 aa, synthetic construct
RLTISVDNSKSQFSLKMSSVQAQDTAVYYCAR

SEQ ID NO: 1330 - protein, 32 aa, synthetic construct
RLTISVDNSKSQFSLKLSSLQAQDTAVYYCAR

SEQ ID NO: 1331 - protein, 32 aa, synthetic construct
RLTISVDNSKNQVSFKMSSLTAADTAVYYCAR

SEQ ID NO: 1332 - protein, 32 aa, synthetic construct
RLTISVDNSKNQVSFKMSSVQAADTAVYYCAR

SEQ ID NO: 1333 - protein, 32 aa, synthetic construct
RLTISVDNSKNQVSFKMSSVTAQDTAVYYCAR

SEQ ID NO: 1334 - protein, 32 aa, synthetic construct
RLTISVDNSKNQVSFKLSSLQAADTAVYYCAR

SEQ ID NO: 1335 - protein, 32 aa, synthetic construct
RLTISVDNSKNQVSFKLSSLTAQDTAVYYCAR

SEQ ID NO: 1336 - protein, 32 aa, synthetic construct
RLTISVDNSKNQVSFKLSSVQAQDTAVYYCAR

SEQ ID NO: 1337 - protein, 32 aa, synthetic construct
RLTISVDNSKNQVSLKMSSLQAADTAVYYCAR

SEQ ID NO: 1338 - protein, 32 aa, synthetic construct
RLTISVDNSKNQVSLKMSSLTAQDTAVYYCAR

SEQ ID NO: 1339 - protein, 32 aa, synthetic construct
RLTISVDNSKNQVSLKMSSVQAQDTAVYYCAR

SEQ ID NO: 1340 - protein, 32 aa, synthetic construct
RLTISVDNSKNQVSLKLSSLQAQDTAVYYCAR

SEQ ID NO: 1341 - protein, 32 aa, synthetic construct
RLTISVDNSKNQFSFKMSSLQAADTAVYYCAR

SEQ ID NO: 1342 - protein, 32 aa, synthetic construct
RLTISVDNSKNQFSFKMSSLTAQDTAVYYCAR

SEQ ID NO: 1343 - protein, 32 aa, synthetic construct
RLTISVDNSKNQFSFKMSSVQAQDTAVYYCAR

SEQ ID NO: 1344 - protein, 32 aa, synthetic construct
RLTISVDNSKNQFSFKLSSLQAQDTAVYYCAR

SEQ ID NO: 1345 - protein, 32 aa, synthetic construct
RLTISVDNSKNQFSLKMSSLQAQDTAVYYCAR

SEQ ID NO: 1346 - protein, 32 aa, synthetic construct
RLTISVDTSKSQVSFKMSSLTAADTAVYYCAR

SEQ ID NO: 1347 - protein, 32 aa, synthetic construct
RLTISVDTSKSQVSFKMSSVQAADTAVYYCAR

SEQ ID NO: 1348 - protein, 32 aa, synthetic construct
RLTISVDTSKSQVSFKMSSVTAQDTAVYYCAR

SEQ ID NO: 1349 - protein, 32 aa, synthetic construct
RLTISVDTSKSQVSFKLSSLQAADTAVYYCAR

SEQ ID NO: 1350 - protein, 32 aa, synthetic construct
RLTISVDTSKSQVSFKLSSLTAQDTAVYYCAR

SEQ ID NO: 1351 - protein, 32 aa, synthetic construct
RLTISVDTSKSQVSFKLSSVQAQDTAVYYCAR

SEQ ID NO: 1352 - protein, 32 aa, synthetic construct
RLTISVDTSKSQVSLKMSSLQAADTAVYYCAR

SEQ ID NO: 1353 - protein, 32 aa, synthetic construct
RLTISVDTSKSQVSLKMSSLTAQDTAVYYCAR

SEQ ID NO: 1354 - protein, 32 aa, synthetic construct
RLTISVDTSKSQVSLKMSSVQAQDTAVYYCAR

SEQ ID NO: 1355 - protein, 32 aa, synthetic construct
RLTISVDTSKSQVSLKLSSLQAQDTAVYYCAR

SEQ ID NO: 1356 - protein, 32 aa, synthetic construct
RLTISVDTSKSQFSFKMSSLQAADTAVYYCAR

SEQ ID NO: 1357 - protein, 32 aa, synthetic construct
RLTISVDTSKSQFSFKMSSLTAQDTAVYYCAR

SEQ ID NO: 1358 - protein, 32 aa, synthetic construct
RLTISVDTSKSQFSFKMSSVQAQDTAVYYCAR

SEQ ID NO: 1359 - protein, 32 aa, synthetic construct
RLTISVDTSKSQFSFKLSSLQAQDTAVYYCAR

SEQ ID NO: 1360 - protein, 32 aa, synthetic construct
RLTISVDTSKSQFSLKMSSLQAQDTAVYYCAR

SEQ ID NO: 1361 - protein, 32 aa, synthetic construct
RLTISVDTSKNQVSFKMSSLQAADTAVYYCAR

SEQ ID NO: 1362 - protein, 32 aa, synthetic construct
RLTISVDTSKNQVSFKMSSLTAQDTAVYYCAR

SEQ ID NO: 1363 - protein, 32 aa, synthetic construct
RLTISVDTSKNQVSFKMSSVQAQDTAVYYCAR

SEQ ID NO: 1364 - protein, 32 aa, synthetic construct
RLTISVDTSKNQVSFKLSSLQAQDTAVYYCAR

SEQ ID NO: 1365 - protein, 32 aa, synthetic construct
RLTISVDTSKNQVSLKMSSLQAQDTAVYYCAR

SEQ ID NO: 1366 - protein, 32 aa, synthetic construct
RLTISVDTSKNQFSFKMSSLQAQDTAVYYCAR

SEQ ID NO: 1367 - protein, 32 aa, synthetic construct
RVTISKDNSKSQVSFKMSSVTAADTAVYYCAR

SEQ ID NO: 1368 - protein, 32 aa, synthetic construct
RVTISKDNSKSQVSFKLSSLTAADTAVYYCAR

SEQ ID NO: 1369 - protein, 32 aa, synthetic construct
RVTISKDNSKSQVSFKLSSVQAADTAVYYCAR

SEQ ID NO: 1370 - protein, 32 aa, synthetic construct
RVTISKDNSKSQVSFKLSSVTAQDTAVYYCAR

SEQ ID NO: 1371 - protein, 32 aa, synthetic construct
RVTISKDNSKSQVSLKMSSLTAADTAVYYCAR

SEQ ID NO: 1372 - protein, 32 aa, synthetic construct
RVTISKDNSKSQVSLKMSSVQAADTAVYYCAR

SEQ ID NO: 1373 - protein, 32 aa, synthetic construct
RVTISKDNSKSQVSLKMSSVTAQDTAVYYCAR

SEQ ID NO: 1374 - protein, 32 aa, synthetic construct
RVTISKDNSKSQVSLKLSSLQAADTAVYYCAR

SEQ ID NO: 1375 - protein, 32 aa, synthetic construct
RVTISKDNSKSQVSLKLSSLTAQDTAVYYCAR

SEQ ID NO: 1376 - protein, 32 aa, synthetic construct
RVTISKDNSKSQVSLKLSSVQAQDTAVYYCAR

SEQ ID NO: 1377 - protein, 32 aa, synthetic construct
RVTISKDNSKSQFSFKMSSLTAADTAVYYCAR

SEQ ID NO: 1378 - protein, 32 aa, synthetic construct
RVTISKDNSKSQFSFKMSSVQAADTAVYYCAR

SEQ ID NO: 1379 - protein, 32 aa, synthetic construct
RVTISKDNSKSQFSFKMSSVTAQDTAVYYCAR

SEQ ID NO: 1380 - protein, 32 aa, synthetic construct
RVTISKDNSKSQFSFKLSSLQAADTAVYYCAR

SEQ ID NO: 1381 - protein, 32 aa, synthetic construct
RVTISKDNSKSQFSFKLSSLTAQDTAVYYCAR

SEQ ID NO: 1382 - protein, 32 aa, synthetic construct
RVTISKDNSKSQFSFKLSSVQAQDTAVYYCAR

SEQ ID NO: 1383 - protein, 32 aa, synthetic construct
RVTISKDNSKSQFSLKMSSLQAADTAVYYCAR

SEQ ID NO: 1384 - protein, 32 aa, synthetic construct
RVTISKDNSKSQFSLKMSSLTAQDTAVYYCAR

SEQ ID NO: 1385 - protein, 32 aa, synthetic construct
RVTISKDNSKSQFSLKMSSVQAQDTAVYYCAR

SEQ ID NO: 1386 - protein, 32 aa, synthetic construct
RVTISKDNSKSQFSLKLSSLQAQDTAVYYCAR

SEQ ID NO: 1387 - protein, 32 aa, synthetic construct
RVTISKDNSKNQVSFKMSSLTAADTAVYYCAR

SEQ ID NO: 1388 - protein, 32 aa, synthetic construct
RVTISKDNSKNQVSFKMSSVQAADTAVYYCAR

SEQ ID NO: 1389 - protein, 32 aa, synthetic construct
RVTISKDNSKNQVSFKMSSVTAQDTAVYYCAR

SEQ ID NO: 1390 - protein, 32 aa, synthetic construct
RVTISKDNSKNQVSFKLSSLQAADTAVYYCAR

SEQ ID NO: 1391 - protein, 32 aa, synthetic construct
RVTISKDNSKNQVSFKLSSLTAQDTAVYYCAR

SEQ ID NO: 1392 - protein, 32 aa, synthetic construct
RVTISKDNSKNQVSFKLSSVQAQDTAVYYCAR

SEQ ID NO: 1393 - protein, 32 aa, synthetic construct
RVTISKDNSKNQVSLKMSSLQAADTAVYYCAR

SEQ ID NO: 1394 - protein, 32 aa, synthetic construct
RVTISKDNSKNQVSLKMSSLTAQDTAVYYCAR

SEQ ID NO: 1395 - protein, 32 aa, synthetic construct
RVTISKDNSKNQVSLKMSSVQAQDTAVYYCAR

SEQ ID NO: 1396 - protein, 32 aa, synthetic construct
RVTISKDNSKNQVSLKLSSLQAQDTAVYYCAR

SEQ ID NO: 1397 - protein, 32 aa, synthetic construct
RVTISKDNSKNQFSFKMSSLQAADTAVYYCAR

SEQ ID NO: 1398 - protein, 32 aa, synthetic construct
RVTISKDNSKNQFSFKMSSLTAQDTAVYYCAR

SEQ ID NO: 1399 - protein, 32 aa, synthetic construct
RVTISKDNSKNQFSFKMSSVQAQDTAVYYCAR

SEQ ID NO: 1400 - protein, 32 aa, synthetic construct
RVTISKDNSKNQFSFKLSSLQAQDTAVYYCAR

SEQ ID NO: 1401 - protein, 32 aa, synthetic construct
RVTISKDNSKNQFSLKMSSLQAQDTAVYYCAR

SEQ ID NO: 1402 - protein, 32 aa, synthetic construct
RVTISKDTSKSQVSFKMSSLTAADTAVYYCAR

SEQ ID NO: 1403 - protein, 32 aa, synthetic construct
RVTISKDTSKSQVSFKMSSVQAADTAVYYCAR

SEQ ID NO: 1404 - protein, 32 aa, synthetic construct
RVTISKDTSKSQVSFKMSSVTAQDTAVYYCAR

SEQ ID NO: 1405 - protein, 32 aa, synthetic construct
RVTISKDTSKSQVSFKLSSLQAADTAVYYCAR

SEQ ID NO: 1406 - protein, 32 aa, synthetic construct
RVTISKDTSKSQVSFKLSSLTAQDTAVYYCAR

SEQ ID NO: 1407 - protein, 32 aa, synthetic construct
RVTISKDTSKSQVSFKLSSVQAQDTAVYYCAR

SEQ ID NO: 1408 - protein, 32 aa, synthetic construct
RVTISKDTSKSQVSLKMSSLQAADTAVYYCAR

SEQ ID NO: 1409 - protein, 32 aa, synthetic construct
RVTISKDTSKSQVSLKMSSLTAQDTAVYYCAR

SEQ ID NO: 1410 - protein, 32 aa, synthetic construct
RVTISKDTSKSQVSLKMSSVQAQDTAVYYCAR

SEQ ID NO: 1411 - protein, 32 aa, synthetic construct
RVTISKDTSKSQVSLKLSSLQAQDTAVYYCAR

SEQ ID NO: 1412 - protein, 32 aa, synthetic construct
RVTISKDTSKSQFSFKMSSLQAADTAVYYCAR

SEQ ID NO: 1413 - protein, 32 aa, synthetic construct
RVTISKDTSKSQFSFKMSSLTAQDTAVYYCAR

SEQ ID NO: 1414 - protein, 32 aa, synthetic construct
RVTISKDTSKSQFSFKMSSVQAQDTAVYYCAR

SEQ ID NO: 1415 - protein, 32 aa, synthetic construct
RVTISKDTSKSQFSFKLSSLQAQDTAVYYCAR

SEQ ID NO: 1416 - protein, 32 aa, synthetic construct
RVTISKDTSKSQFSLKMSSLQAQDTAVYYCAR

SEQ ID NO: 1417 - protein, 32 aa, synthetic construct
RVTISKDTSKNQVSFKMSSLQAADTAVYYCAR

SEQ ID NO: 1418 - protein, 32 aa, synthetic construct
RVTISKDTSKNQVSFKMSSLTAQDTAVYYCAR

SEQ ID NO: 1419 - protein, 32 aa, synthetic construct
RVTISKDTSKNQVSFKMSSVQAQDTAVYYCAR

SEQ ID NO: 1420 - protein, 32 aa, synthetic construct
RVTISKDTSKNQVSFKLSSLQAQDTAVYYCAR

SEQ ID NO: 1421 - protein, 32 aa, synthetic construct
RVTISKDTSKNQVSLKMSSLQAQDTAVYYCAR

SEQ ID NO: 1422 - protein, 32 aa, synthetic construct
RVTISKDTSKNQFSFKMSSLQAQDTAVYYCAR

SEQ ID NO: 1423 - protein, 32 aa, synthetic construct
RVTISVDNSKSQVSFKMSSLTAADTAVYYCAR

SEQ ID NO: 1424 - protein, 32 aa, synthetic construct
RVTISVDNSKSQVSFKMSSVQAADTAVYYCAR

SEQ ID NO: 1425 - protein, 32 aa, synthetic construct
RVTISVDNSKSQVSFKMSSVTAQDTAVYYCAR

SEQ ID NO: 1426 - protein, 32 aa, synthetic construct
RVTISVDNSKSQVSFKLSSLQAADTAVYYCAR

SEQ ID NO: 1427 - protein, 32 aa, synthetic construct
RVTISVDNSKSQVSFKLSSLTAQDTAVYYCAR

SEQ ID NO: 1428 - protein, 32 aa, synthetic construct
RVTISVDNSKSQVSFKLSSVQAQDTAVYYCAR

SEQ ID NO: 1429 - protein, 32 aa, synthetic construct
RVTISVDNSKSQVSLKMSSLQAADTAVYYCAR

SEQ ID NO: 1430 - protein, 32 aa, synthetic construct
RVTISVDNSKSQVSLKMSSLTAQDTAVYYCAR

SEQ ID NO: 1431 - protein, 32 aa, synthetic construct
RVTISVDNSKSQVSLKMSSVQAQDTAVYYCAR

SEQ ID NO: 1432 - protein, 32 aa, synthetic construct
RVTISVDNSKSQVSLKLSSLQAQDTAVYYCAR

SEQ ID NO: 1433 - protein, 32 aa, synthetic construct
RVTISVDNSKSQFSFKMSSLQAADTAVYYCAR

SEQ ID NO: 1434 - protein, 32 aa, synthetic construct
RVTISVDNSKSQFSFKMSSLTAQDTAVYYCAR

SEQ ID NO: 1435 - protein, 32 aa, synthetic construct
RVTISVDNSKSQFSFKMSSVQAQDTAVYYCAR

SEQ ID NO: 1436 - protein, 32 aa, synthetic construct
RVTISVDNSKSQFSFKLSSLQAQDTAVYYCAR

SEQ ID NO: 1437 - protein, 32 aa, synthetic construct
RVTISVDNSKSQFSLKMSSLQAQDTAVYYCAR

SEQ ID NO: 1438 - protein, 32 aa, synthetic construct
RVTISVDNSKNQVSFKMSSLQAADTAVYYCAR

SEQ ID NO: 1439 - protein, 32 aa, synthetic construct
RVTISVDNSKNQVSFKMSSLTAQDTAVYYCAR

SEQ ID NO: 1440 - protein, 32 aa, synthetic construct
RVTISVDNSKNQVSFKMSSVQAQDTAVYYCAR

SEQ ID NO: 1441 - protein, 32 aa, synthetic construct
RVTISVDNSKNQVSFKLSSLQAQDTAVYYCAR

SEQ ID NO: 1442 - protein, 32 aa, synthetic construct
RVTISVDNSKNQVSLKMSSLQAQDTAVYYCAR

SEQ ID NO: 1443 - protein, 32 aa, synthetic construct
RVTISVDNSKNQFSFKMSSLQAQDTAVYYCAR

SEQ ID NO: 1444 - protein, 32 aa, synthetic construct
RVTISVDTSKSQVSFKMSSLQAADTAVYYCAR

SEQ ID NO: 1445 - protein, 32 aa, synthetic construct
RVTISVDTSKSQVSFKMSSLTAQDTAVYYCAR

SEQ ID NO: 1446 - protein, 32 aa, synthetic construct
RVTISVDTSKSQVSFKMSSVQAQDTAVYYCAR

SEQ ID NO: 1447 - protein, 32 aa, synthetic construct
RVTISVDTSKSQVSFKLSSLQAQDTAVYYCAR

SEQ ID NO: 1448 - protein, 32 aa, synthetic construct
RVTISVDTSKSQVSLKMSSLQAQDTAVYYCAR

SEQ ID NO: 1449 - protein, 32 aa, synthetic construct
RVTISVDTSKSQFSFKMSSLQAQDTAVYYCAR

SEQ ID NO: 1450 - protein, 32 aa, synthetic construct
RVTISVDTSKNQVSFKMSSLQAQDTAVYYCAR

SEQ ID NO: 1451 - protein, 32 aa, synthetic construct
RLTISKDNSKSQVSFKMSSVTAADTAVYYCAR

SEQ ID NO: 1452 - protein, 32 aa, synthetic construct
RLTISKDNSKSQVSFKLSSLTAADTAVYYCAR

SEQ ID NO: 1453 - protein, 32 aa, synthetic construct
RLTISKDNSKSQVSFKLSSVQAADTAVYYCAR

SEQ ID NO: 1454 - protein, 32 aa, synthetic construct
RLTISKDNSKSQVSFKLSSVTAQDTAVYYCAR

SEQ ID NO: 1455 - protein, 32 aa, synthetic construct
RLTISKDNSKSQVSLKMSSLTAADTAVYYCAR

SEQ ID NO: 1456 - protein, 32 aa, synthetic construct
RLTISKDNSKSQVSLKMSSVQAADTAVYYCAR

SEQ ID NO: 1457 - protein, 32 aa, synthetic construct
RLTISKDNSKSQVSLKMSSVTAQDTAVYYCAR

SEQ ID NO: 1458 - protein, 32 aa, synthetic construct
  REGION 1..32: note = VH Framework 3 (FR3)
RLTISKDNSKSQVSLKLSSLQAADTAVYYCAR

SEQ ID NO: 1459 - protein, 32 aa, synthetic construct
RLTISKDNSKSQVSLKLSSLTAQDTAVYYCAR

SEQ ID NO: 1460 - protein, 32 aa, synthetic construct
RLTISKDNSKSQVSLKLSSVQAQDTAVYYCAR

SEQ ID NO: 1461 - protein, 32 aa, synthetic construct
RLTISKDNSKSQFSFKMSSLTAADTAVYYCAR

SEQ ID NO: 1462 - protein, 32 aa, synthetic construct
RLTISKDNSKSQFSFKMSSVQAADTAVYYCAR

SEQ ID NO: 1463 - protein, 32 aa, synthetic construct
RLTISKDNSKSQFSFKMSSVTAQDTAVYYCAR

SEQ ID NO: 1464 - protein, 32 aa, synthetic construct
RLTISKDNSKSQFSFKLSSLQAADTAVYYCAR

SEQ ID NO: 1465 - protein, 32 aa, synthetic construct
RLTISKDNSKSQFSFKLSSLTAQDTAVYYCAR

SEQ ID NO: 1466 - protein, 32 aa, synthetic construct
RLTISKDNSKSQFSFKLSSVQAQDTAVYYCAR

SEQ ID NO: 1467 - protein, 32 aa, synthetic construct
RLTISKDNSKSQFSLKMSSLQAADTAVYYCAR

SEQ ID NO: 1468 - protein, 32 aa, synthetic construct
RLTISKDNSKSQFSLKMSSLTAQDTAVYYCAR

SEQ ID NO: 1469 - protein, 32 aa, synthetic construct
RLTISKDNSKSQFSLKMSSVQAQDTAVYYCAR

SEQ ID NO: 1470 - protein, 32 aa, synthetic construct
RLTISKDNSKSQFSLKLSSLQAQDTAVYYCAR

SEQ ID NO: 1471 - protein, 32 aa, synthetic construct
RLTISKDNSKNQVSFKMSSLTAADTAVYYCAR

SEQ ID NO: 1472 - protein, 32 aa, synthetic construct
RLTISKDNSKNQVSFKMSSVQAADTAVYYCAR

SEQ ID NO: 1473 - protein, 32 aa, synthetic construct
RLTISKDNSKNQVSFKMSSVTAQDTAVYYCAR

SEQ ID NO: 1474 - protein, 32 aa, synthetic construct
RLTISKDNSKNQVSFKLSSLQAADTAVYYCAR

SEQ ID NO: 1475 - protein, 32 aa, synthetic construct
RLTISKDNSKNQVSFKLSSLTAQDTAVYYCAR

SEQ ID NO: 1476 - protein, 32 aa, synthetic construct
RLTISKDNSKNQVSFKLSSVQAQDTAVYYCAR

SEQ ID NO: 1477 - protein, 32 aa, synthetic construct
RLTISKDNSKNQVSLKMSSLQAADTAVYYCAR

SEQ ID NO: 1478 - protein, 32 aa, synthetic construct
RLTISKDNSKNQVSLKMSSLTAQDTAVYYCAR

SEQ ID NO: 1479 - protein, 32 aa, synthetic construct
RLTISKDNSKNQVSLKMSSVQAQDTAVYYCAR

SEQ ID NO: 1480 - protein, 32 aa, synthetic construct
RLTISKDNSKNQVSLKLSSLQAQDTAVYYCAR

SEQ ID NO: 1481 - protein, 32 aa, synthetic construct
RLTISKDNSKNQFSFKMSSLQAADTAVYYCAR

SEQ ID NO: 1482 - protein, 32 aa, synthetic construct
RLTISKDNSKNQFSFKMSSLTAQDTAVYYCAR

SEQ ID NO: 1483 - protein, 32 aa, synthetic construct
RLTISKDNSKNQFSFKMSSVQAQDTAVYYCAR

SEQ ID NO: 1484 - protein, 32 aa, synthetic construct
RLTISKDNSKNQFSFKLSSLQAQDTAVYYCAR

SEQ ID NO: 1485 - protein, 32 aa, synthetic construct
RLTISKDNSKNQFSLKMSSLQAQDTAVYYCAR

SEQ ID NO: 1486 - protein, 32 aa, synthetic construct
RLTISKDTSKSQVSFKMSSLTAADTAVYYCAR

SEQ ID NO: 1487 - protein, 32 aa, synthetic construct
RLTISKDTSKSQVSFKMSSVQAADTAVYYCAR

SEQ ID NO: 1488 - protein, 32 aa, synthetic construct
RLTISKDTSKSQVSFKMSSVTAQDTAVYYCAR

SEQ ID NO: 1489 - protein, 32 aa, synthetic construct
RLTISKDTSKSQVSFKLSSLQAADTAVYYCAR

SEQ ID NO: 1490 - protein, 32 aa, synthetic construct
RLTISKDTSKSQVSFKLSSLTAQDTAVYYCAR

SEQ ID NO: 1491 - protein, 32 aa, synthetic construct
RLTISKDTSKSQVSFKLSSVQAQDTAVYYCAR

SEQ ID NO: 1492 - protein, 32 aa, synthetic construct
RLTISKDTSKSQVSLKMSSLQAADTAVYYCAR

SEQ ID NO: 1493 - protein, 32 aa, synthetic construct
RLTISKDTSKSQVSLKMSSLTAQDTAVYYCAR

SEQ ID NO: 1494 - protein, 32 aa, synthetic construct
RLTISKDTSKSQVSLKMSSVQAQDTAVYYCAR

SEQ ID NO: 1495 - protein, 32 aa, synthetic construct
RLTISKDTSKSQVSLKLSSLQAQDTAVYYCAR

SEQ ID NO: 1496 - protein, 32 aa, synthetic construct
RLTISKDTSKSQFSFKMSSLQAADTAVYYCAR

SEQ ID NO: 1497 - protein, 32 aa, synthetic construct
RLTISKDTSKSQFSFKMSSLTAQDTAVYYCAR

SEQ ID NO: 1498 - protein, 32 aa, synthetic construct
RLTISKDTSKSQFSFKMSSVQAQDTAVYYCAR

SEQ ID NO: 1499 - protein, 32 aa, synthetic construct
RLTISKDTSKSQFSFKLSSLQAQDTAVYYCAR

SEQ ID NO: 1500 - protein, 32 aa, synthetic construct
RLTISKDTSKSQFSLKMSSLQAQDTAVYYCAR

SEQ ID NO: 1501 - protein, 32 aa, synthetic construct
RLTISKDTSKNQVSFKMSSLQAADTAVYYCAR

SEQ ID NO: 1502 - protein, 32 aa, synthetic construct
RLTISKDTSKNQVSFKMSSLTAQDTAVYYCAR

SEQ ID NO: 1503 - protein, 32 aa, synthetic construct
RLTISKDTSKNQVSFKMSSVQAQDTAVYYCAR

SEQ ID NO: 1504 - protein, 32 aa, synthetic construct
RLTISKDTSKNQVSFKLSSLQAQDTAVYYCAR

SEQ ID NO: 1505 - protein, 32 aa, synthetic construct
RLTISKDTSKNQVSLKMSSLQAQDTAVYYCAR

SEQ ID NO: 1506 - protein, 32 aa, synthetic construct
RLTISKDTSKNQFSFKMSSLQAQDTAVYYCAR

SEQ ID NO: 1507 - protein, 32 aa, synthetic construct
RLTISVDNSKSQVSFKMSSLTAADTAVYYCAR

SEQ ID NO: 1508 - protein, 32 aa, synthetic construct
RLTISVDNSKSQVSFKMSSVQAADTAVYYCAR

SEQ ID NO: 1509 - protein, 32 aa, synthetic construct
RLTISVDNSKSQVSFKMSSVTAQDTAVYYCAR

SEQ ID NO: 1510 - protein, 32 aa, synthetic construct
RLTISVDNSKSQVSFKLSSLQAADTAVYYCAR

SEQ ID NO: 1511 - protein, 32 aa, synthetic construct
RLTISVDNSKSQVSFKLSSLTAQDTAVYYCAR

SEQ ID NO: 1512 - protein, 32 aa, synthetic construct
RLTISVDNSKSQVSFKLSSVQAQDTAVYYCAR

SEQ ID NO: 1513 - protein, 32 aa, synthetic construct
RLTISVDNSKSQVSLKMSSLQAADTAVYYCAR

SEQ ID NO: 1514 - protein, 32 aa, synthetic construct
RLTISVDNSKSQVSLKMSSLTAQDTAVYYCAR

SEQ ID NO: 1515 - protein, 32 aa, synthetic construct
RLTISVDNSKSQVSLKMSSVQAQDTAVYYCAR

SEQ ID NO: 1516 - protein, 32 aa, synthetic construct
RLTISVDNSKSQVSLKLSSLQAQDTAVYYCAR

SEQ ID NO: 1517 - protein, 32 aa, synthetic construct
RLTISVDNSKSQFSFKMSSLQAADTAVYYCAR

SEQ ID NO: 1518 - protein, 32 aa, synthetic construct
RLTISVDNSKSQFSFKMSSLTAQDTAVYYCAR

SEQ ID NO: 1519 - protein, 32 aa, synthetic construct
RLTISVDNSKSQFSFKMSSVQAQDTAVYYCAR

SEQ ID NO: 1520 - protein, 32 aa, synthetic construct
RLTISVDNSKSQFSFKLSSLQAQDTAVYYCAR

SEQ ID NO: 1521 - protein, 32 aa, synthetic construct
RLTISVDNSKSQFSLKMSSLQAQDTAVYYCAR

SEQ ID NO: 1522 - protein, 32 aa, synthetic construct
RLTISVDNSKNQVSFKMSSLQAADTAVYYCAR

SEQ ID NO: 1523 - protein, 32 aa, synthetic construct
RLTISVDNSKNQVSFKMSSLTAQDTAVYYCAR

SEQ ID NO: 1524 - protein, 32 aa, synthetic construct
RLTISVDNSKNQVSFKMSSVQAQDTAVYYCAR

SEQ ID NO: 1525 - protein, 32 aa, synthetic construct
RLTISVDNSKNQVSFKLSSLQAQDTAVYYCAR

SEQ ID NO: 1526 - protein, 32 aa, synthetic construct
RLTISVDNSKNQVSLKMSSLQAQDTAVYYCAR

SEQ ID NO: 1527 - protein, 32 aa, synthetic construct
RLTISVDNSKNQFSFKMSSLQAQDTAVYYCAR

SEQ ID NO: 1528 - protein, 32 aa, synthetic construct
RLTISVDTSKSQVSFKMSSLQAADTAVYYCAR

SEQ ID NO: 1529 - protein, 32 aa, synthetic construct
RLTISVDTSKSQVSFKMSSLTAQDTAVYYCAR

SEQ ID NO: 1530 - protein, 32 aa, synthetic construct
RLTISVDTSKSQVSFKMSSVQAQDTAVYYCAR

SEQ ID NO: 1531 - protein, 32 aa, synthetic construct
RLTISVDTSKSQVSFKLSSLQAQDTAVYYCAR

SEQ ID NO: 1532 - protein, 32 aa, synthetic construct
RLTISVDTSKSQVSLKMSSLQAQDTAVYYCAR

SEQ ID NO: 1533 - protein, 32 aa, synthetic construct
RLTISVDTSKSQFSFKMSSLQAQDTAVYYCAR

SEQ ID NO: 1534 - protein, 32 aa, synthetic construct
RLTISVDTSKNQVSFKMSSLQAQDTAVYYCAR

SEQ ID NO: 1535 - protein, 32 aa, synthetic construct
RVTISKDNSKSQVSFKMSSLTAADTAVYYCAR

SEQ ID NO: 1536 - protein, 32 aa, synthetic construct
RVTISKDNSKSQVSFKMSSVQAADTAVYYCAR

SEQ ID NO: 1537 - protein, 32 aa, synthetic construct
RVTISKDNSKSQVSFKMSSVTAQDTAVYYCAR

SEQ ID NO: 1538 - protein, 32 aa, synthetic construct
RVTISKDNSKSQVSFKLSSLQAADTAVYYCAR

SEQ ID NO: 1539 - protein, 32 aa, synthetic construct
RVTISKDNSKSQVSFKLSSLTAQDTAVYYCAR

SEQ ID NO: 1540 - protein, 32 aa, synthetic construct
RVTISKDNSKSQVSFKLSSVQAQDTAVYYCAR

SEQ ID NO: 1541 - protein, 32 aa, synthetic construct
RVTISKDNSKSQVSLKMSSLQAADTAVYYCAR

SEQ ID NO: 1542 - protein, 32 aa, synthetic construct
RVTISKDNSKSQVSLKMSSLTAQDTAVYYCAR

SEQ ID NO: 1543 - protein, 32 aa, synthetic construct
RVTISKDNSKSQVSLKMSSVQAQDTAVYYCAR

SEQ ID NO: 1544 - protein, 32 aa, synthetic construct
RVTISKDNSKSQVSLKLSSLQAQDTAVYYCAR

SEQ ID NO: 1545 - protein, 32 aa, synthetic construct
RVTISKDNSKSQFSFKMSSLQAADTAVYYCAR

SEQ ID NO: 1546 - protein, 32 aa, synthetic construct
RVTISKDNSKSQFSFKMSSLTAQDTAVYYCAR

SEQ ID NO: 1547 - protein, 32 aa, synthetic construct
RVTISKDNSKSQFSFKMSSVQAQDTAVYYCAR

SEQ ID NO: 1548 - protein, 32 aa, synthetic construct
RVTISKDNSKSQFSFKLSSLQAQDTAVYYCAR

SEQ ID NO: 1549 - protein, 32 aa, synthetic construct
RVTISKDNSKSQFSLKMSSLQAQDTAVYYCAR

SEQ ID NO: 1550 - protein, 32 aa, synthetic construct
RVTISKDNSKNQVSFKMSSLQAADTAVYYCAR

SEQ ID NO: 1551 - protein, 32 aa, synthetic construct
RVTISKDNSKNQVSFKMSSLTAQDTAVYYCAR

SEQ ID NO: 1552 - protein, 32 aa, synthetic construct
RVTISKDNSKNQVSFKMSSVQAQDTAVYYCAR

SEQ ID NO: 1553 - protein, 32 aa, synthetic construct
RVTISKDNSKNQVSFKLSSLQAQDTAVYYCAR

SEQ ID NO: 1554 - protein, 32 aa, synthetic construct
RVTISKDNSKNQVSLKMSSLQAQDTAVYYCAR

SEQ ID NO: 1555 - protein, 32 aa, synthetic construct
RVTISKDNSKNQFSFKMSSLQAQDTAVYYCAR

SEQ ID NO: 1556 - protein, 32 aa, synthetic construct
RVTISKDTSKSQVSFKMSSLQAADTAVYYCAR

SEQ ID NO: 1557 - protein, 32 aa, synthetic construct
RVTISKDTSKSQVSFKMSSLTAQDTAVYYCAR

SEQ ID NO: 1558 - protein, 32 aa, synthetic construct
RVTISKDTSKSQVSFKMSSVQAQDTAVYYCAR

SEQ ID NO: 1559 - protein, 32 aa, synthetic construct
RVTISKDTSKSQVSFKLSSLQAQDTAVYYCAR

SEQ ID NO: 1560 - protein, 32 aa, synthetic construct
RVTISKDTSKSQVSLKMSSLQAQDTAVYYCAR

SEQ ID NO: 1561 - protein, 32 aa, synthetic construct
RVTISKDTSKSQFSFKMSSLQAQDTAVYYCAR

SEQ ID NO: 1562 - protein, 32 aa, synthetic construct
RVTISKDTSKNQVSFKMSSLQAQDTAVYYCAR

SEQ ID NO: 1563 - protein, 32 aa, synthetic construct
RVTISVDNSKSQVSFKMSSLQAADTAVYYCAR

SEQ ID NO: 1564 - protein, 32 aa, synthetic construct
RVTISVDNSKSQVSFKMSSLTAQDTAVYYCAR

SEQ ID NO: 1565 - protein, 32 aa, synthetic construct
RVTISVDNSKSQVSFKMSSVQAQDTAVYYCAR

SEQ ID NO: 1566 - protein, 32 aa, synthetic construct
RVTISVDNSKSQVSFKLSSLQAQDTAVYYCAR

SEQ ID NO: 1567 - protein, 32 aa, synthetic construct
RVTISVDNSKSQVSLKMSSLQAQDTAVYYCAR

SEQ ID NO: 1568 - protein, 32 aa, synthetic construct
RVTISVDNSKSQFSFKMSSLQAQDTAVYYCAR

SEQ ID NO: 1569 - protein, 32 aa, synthetic construct
RVTISVDNSKNQVSFKMSSLQAQDTAVYYCAR

SEQ ID NO: 1570 - protein, 32 aa, synthetic construct
RVTISVDTSKSQVSFKMSSLQAQDTAVYYCAR

SEQ ID NO: 1571 - protein, 32 aa, synthetic construct
RLTISKDNSKSQVSFKMSSLTAADTAVYYCAR

SEQ ID NO: 1572 - protein, 32 aa, synthetic construct
RLTISKDNSKSQVSFKMSSVQAADTAVYYCAR

SEQ ID NO: 1573 - protein, 32 aa, synthetic construct
RLTISKDNSKSQVSFKMSSVTAQDTAVYYCAR

SEQ ID NO: 1574 - protein, 32 aa, synthetic construct
RLTISKDNSKSQVSFKLSSLQAADTAVYYCAR

SEQ ID NO: 1575 - protein, 32 aa, synthetic construct
RLTISKDNSKSQVSFKLSSLTAQDTAVYYCAR

SEQ ID NO: 1576 - protein, 32 aa, synthetic construct
RLTISKDNSKSQVSFKLSSVQAQDTAVYYCAR

SEQ ID NO: 1577 - protein, 32 aa, synthetic construct
RLTISKDNSKSQVSLKMSSLQAADTAVYYCAR

SEQ ID NO: 1578 - protein, 32 aa, synthetic construct
RLTISKDNSKSQVSLKMSSLTAQDTAVYYCAR

SEQ ID NO: 1579 - protein, 32 aa, synthetic construct
RLTISKDNSKSQVSLKMSSVQAQDTAVYYCAR

SEQ ID NO: 1580 - protein, 32 aa, synthetic construct
RLTISKDNSKSQVSLKLSSLQAQDTAVYYCAR

SEQ ID NO: 1581 - protein, 32 aa, synthetic construct
RLTISKDNSKSQFSFKMSSLQAADTAVYYCAR

SEQ ID NO: 1582 - protein, 32 aa, synthetic construct
RLTISKDNSKSQFSFKMSSLTAQDTAVYYCAR

SEQ ID NO: 1583 - protein, 32 aa, synthetic construct
RLTISKDNSKSQFSFKMSSVQAQDTAVYYCAR

SEQ ID NO: 1584 - protein, 32 aa, synthetic construct
RLTISKDNSKSQFSFKLSSLQAQDTAVYYCAR

SEQ ID NO: 1585 - protein, 32 aa, synthetic construct
RLTISKDNSKSQFSLKMSSLQAQDTAVYYCAR

SEQ ID NO: 1586 - protein, 32 aa, synthetic construct
RLTISKDNSKNQVSFKMSSLQAADTAVYYCAR

SEQ ID NO: 1587 - protein, 32 aa, synthetic construct
RLTISKDNSKNQVSFKMSSLTAQDTAVYYCAR

SEQ ID NO: 1588 - protein, 32 aa, synthetic construct
RLTISKDNSKNQVSFKMSSVQAQDTAVYYCAR

SEQ ID NO: 1589 - protein, 32 aa, synthetic construct
RLTISKDNSKNQVSFKLSSLQAQDTAVYYCAR

SEQ ID NO: 1590 - protein, 32 aa, synthetic construct
RLTISKDNSKNQVSLKMSSLQAQDTAVYYCAR

SEQ ID NO: 1591 - protein, 32 aa, synthetic construct
RLTISKDNSKNQFSFKMSSLQAQDTAVYYCAR

SEQ ID NO: 1592 - protein, 32 aa, synthetic construct
RLTISKDTSKSQVSFKMSSLQAADTAVYYCAR

SEQ ID NO: 1593 - protein, 32 aa, synthetic construct
RLTISKDTSKSQVSFKMSSLTAQDTAVYYCAR

SEQ ID NO: 1594 - protein, 32 aa, synthetic construct
RLTISKDTSKSQVSFKMSSVQAQDTAVYYCAR

SEQ ID NO: 1595 - protein, 32 aa, synthetic construct
RLTISKDTSKSQVSFKLSSLQAQDTAVYYCAR

SEQ ID NO: 1596 - protein, 32 aa, synthetic construct
RLTISKDTSKSQVSLKMSSLQAQDTAVYYCAR

SEQ ID NO: 1597 - protein, 32 aa, synthetic construct
RLTISKDTSKSQFSFKMSSLQAQDTAVYYCAR

SEQ ID NO: 1598 - protein, 32 aa, synthetic construct
RLTISKDTSKNQVSFKMSSLQAQDTAVYYCAR

SEQ ID NO: 1599 - protein, 32 aa, synthetic construct
RLTISVDNSKSQVSFKMSSLQAADTAVYYCAR

SEQ ID NO: 1600 - protein, 32 aa, synthetic construct
RLTISVDNSKSQVSFKMSSLTAQDTAVYYCAR

SEQ ID NO: 1601 - protein, 32 aa, synthetic construct
RLTISVDNSKSQVSFKMSSVQAQDTAVYYCAR

SEQ ID NO: 1602 - protein, 32 aa, synthetic construct
RLTISVDNSKSQVSFKLSSLQAQDTAVYYCAR

SEQ ID NO: 1603 - protein, 32 aa, synthetic construct
RLTISVDNSKSQVSLKMSSLQAQDTAVYYCAR

SEQ ID NO: 1604 - protein, 32 aa, synthetic construct
RLTISVDNSKSQFSFKMSSLQAQDTAVYYCAR

SEQ ID NO: 1605 - protein, 32 aa, synthetic construct
RLTISVDNSKNQVSFKMSSLQAQDTAVYYCAR

SEQ ID NO: 1606 - protein, 32 aa, synthetic construct
RLTISVDTSKSQVSFKMSSLQAQDTAVYYCAR

SEQ ID NO: 1607 - protein, 32 aa, synthetic construct
RVTISKDNSKSQVSFKMSSLQAADTAVYYCAR

SEQ ID NO: 1608 - protein, 32 aa, synthetic construct
RVTISKDNSKSQVSFKMSSLTAQDTAVYYCAR

SEQ ID NO: 1609 - protein, 32 aa, synthetic construct
RVTISKDNSKSQVSFKMSSVQAQDTAVYYCAR

SEQ ID NO: 1610 - protein, 32 aa, synthetic construct
RVTISKDNSKSQVSFKLSSLQAQDTAVYYCAR

SEQ ID NO: 1611 - protein, 32 aa, synthetic construct
RVTISKDNSKSQVSLKMSSLQAQDTAVYYCAR

SEQ ID NO: 1612 - protein, 32 aa, synthetic construct
RVTISKDNSKSQFSFKMSSLQAQDTAVYYCAR

SEQ ID NO: 1613 - protein, 32 aa, synthetic construct
RVTISKDNSKNQVSFKMSSLQAQDTAVYYCAR

SEQ ID NO: 1614 - protein, 32 aa, synthetic construct
RVTISKDTSKSQVSFKMSSLQAQDTAVYYCAR

SEQ ID NO: 1615 - protein, 32 aa, synthetic construct
RVTISVDNSKSQVSFKMSSLQAQDTAVYYCAR

SEQ ID NO: 1616 - protein, 32 aa, synthetic construct
RLTISKDNSKSQVSFKMSSLQAADTAVYYCAR

SEQ ID NO: 1617 - protein, 32 aa, synthetic construct
RLTISKDNSKSQVSFKMSSLTAQDTAVYYCAR

SEQ ID NO: 1618 - protein, 32 aa, synthetic construct
RLTISKDNSKSQVSFKMSSVQAQDTAVYYCAR

SEQ ID NO: 1619 - protein, 32 aa, synthetic construct
RLTISKDNSKSQVSFKLSSLQAQDTAVYYCAR

SEQ ID NO: 1620 - protein, 32 aa, synthetic construct
RLTISKDNSKSQVSLKMSSLQAQDTAVYYCAR

SEQ ID NO: 1621 - protein, 32 aa, synthetic construct
RLTISKDNSKSQFSFKMSSLQAQDTAVYYCAR

SEQ ID NO: 1622 - protein, 32 aa, synthetic construct
RLTISKDNSKNQVSFKMSSLQAQDTAVYYCAR

SEQ ID NO: 1623 - protein, 32 aa, synthetic construct
RLTISKDTSKSQVSFKMSSLQAQDTAVYYCAR

SEQ ID NO: 1624 - protein, 32 aa, synthetic construct
RLTISVDNSKSQVSFKMSSLQAQDTAVYYCAR

SEQ ID NO: 1625 - protein, 32 aa, synthetic construct
RVTISKDNSKSQVSFKMSSLQAQDTAVYYCAR

SEQ ID NO: 1626 - protein, 32 aa, synthetic construct
RLTISKDNSKSQVSFKMSSLQAQDTAVYYCAR

SEQ ID NO: 1627 - protein, 32 aa, synthetic construct
RVTISRDTSKNQFSLKLSSVTAADTAVYYCAR

SEQ ID NO: 1628 - protein, 32 aa, synthetic construct
RLTISRDTSKNQFSLKLSSVTAADTAVYYCAR

SEQ ID NO: 1629 - protein, 32 aa, synthetic construct
RVTISRDTSKSQFSLKLSSVTAADTAVYYCAR

SEQ ID NO: 1630 - protein, 32 aa, synthetic construct
RVTISRDTSKNQVSLKLSSVTAADTAVYYCAR

SEQ ID NO: 1631 - protein, 32 aa, synthetic construct
RVTISRDTSKNQFSFKLSSVTAADTAVYYCAR

SEQ ID NO: 1632 - protein, 32 aa, synthetic construct
RLTISRDTSKSQFSLKLSSVTAADTAVYYCAR

SEQ ID NO: 1633 - protein, 32 aa, synthetic construct
RLTISRDTSKNQVSLKLSSVTAADTAVYYCAR

SEQ ID NO: 1634 - protein, 32 aa, synthetic construct
RLTISRDTSKNQFSFKLSSVTAADTAVYYCAR

SEQ ID NO: 1635 - protein, 32 aa, synthetic construct
RVTISRDTSKSQVSLKLSSVTAADTAVYYCAR

SEQ ID NO: 1636 - protein, 32 aa, synthetic construct
RVTISRDTSKSQFSFKLSSVTAADTAVYYCAR

SEQ ID NO: 1637 - protein, 32 aa, synthetic construct
RVTISRDTSKNQVSFKLSSVTAADTAVYYCAR

SEQ ID NO: 1638 - protein, 32 aa, synthetic construct
RLTISRDTSKSQVSLKLSSVTAADTAVYYCAR

SEQ ID NO: 1639 - protein, 32 aa, synthetic construct
RLTISRDTSKSQFSFKLSSVTAADTAVYYCAR

SEQ ID NO: 1640 - protein, 32 aa, synthetic construct
RLTISRDTSKNQVSFKLSSVTAADTAVYYCAR

SEQ ID NO: 1641 - protein, 32 aa, synthetic construct
RVTISRDTSKSQVSFKLSSVTAADTAVYYCAR

SEQ ID NO: 1642 - protein, 32 aa, synthetic construct
RLTISRDTSKSQVSFKLSSVTAADTAVYYCAR

SEQ ID NO: 1643 - protein, 32 aa, synthetic construct
RVTITADESTSTAYMELSSLRSEDTAVYYCAR

SEQ ID NO: 1644 - protein, 32 aa, synthetic construct
RFTITADESTSTAYMELSSLRSEDTAVYYCAR

SEQ ID NO: 1645 - protein, 32 aa, synthetic construct
RVTFTADESTSTAYMELSSLRSEDTAVYYCAR

SEQ ID NO: 1646 - protein, 32 aa, synthetic construct
RVTITLDESTSTAYMELSSLRSEDTAVYYCAR

SEQ ID NO: 1647 - protein, 32 aa, synthetic construct
RVTITADESTSTAYMELSNLRSEDTAVYYCAR

SEQ ID NO: 1648 - protein, 32 aa, synthetic construct
RVTITADESTSTAYMELSSLRSEDTAVFYCAR

SEQ ID NO: 1649 - protein, 32 aa, synthetic construct
RFTFTADESTSTAYMELSSLRSEDTAVYYCAR

SEQ ID NO: 1650 - protein, 32 aa, synthetic construct
RFTITLDESTSTAYMELSSLRSEDTAVYYCAR

SEQ ID NO: 1651 - protein, 32 aa, synthetic construct
RFTITADESTSTAYMELSNLRSEDTAVYYCAR

SEQ ID NO: 1652 - protein, 32 aa, synthetic construct
RFTITADESTSTAYMELSSLRSEDTAVFYCAR

SEQ ID NO: 1653 - protein, 32 aa, synthetic construct
RVTFTLDESTSTAYMELSSLRSEDTAVYYCAR

SEQ ID NO: 1654 - protein, 32 aa, synthetic construct
RVTFTADESTSTAYMELSNLRSEDTAVYYCAR

SEQ ID NO: 1655 - protein, 32 aa, synthetic construct
RVTFTADESTSTAYMELSSLRSEDTAVFYCAR

SEQ ID NO: 1656 - protein, 32 aa, synthetic construct
RVTITLDESTSTAYMELSNLRSEDTAVYYCAR

SEQ ID NO: 1657 - protein, 32 aa, synthetic construct
RVTITLDESTSTAYMELSSLRSEDTAVFYCAR

SEQ ID NO: 1658 - protein, 32 aa, synthetic construct
RVTITADESTSTAYMELSNLRSEDTAVFYCAR

SEQ ID NO: 1659 - protein, 32 aa, synthetic construct
RFTFTLDESTSTAYMELSSLRSEDTAVYYCAR

SEQ ID NO: 1660 - protein, 32 aa, synthetic construct
RFTFTADESTSTAYMELSNLRSEDTAVYYCAR

SEQ ID NO: 1661 - protein, 32 aa, synthetic construct
RFTFTADESTSTAYMELSSLRSEDTAVFYCAR

SEQ ID NO: 1662 - protein, 32 aa, synthetic construct
RVTFTLDESTSTAYMELSNLRSEDTAVYYCAR

SEQ ID NO: 1663 - protein, 32 aa, synthetic construct
RVTFTLDESTSTAYMELSSLRSEDTAVFYCAR

SEQ ID NO: 1664 - protein, 32 aa, synthetic construct
RVTFTADESTSTAYMELSNLRSEDTAVFYCAR

SEQ ID NO: 1665 - protein, 32 aa, synthetic construct
RVTITLDESTSTAYMELSNLRSEDTAVFYCAR

SEQ ID NO: 1666 - protein, 32 aa, synthetic construct
RFTFTLDESTSTAYMELSNLRSEDTAVYYCAR

SEQ ID NO: 1667 - protein, 32 aa, synthetic construct
RFTFTLDESTSTAYMELSSLRSEDTAVFYCAR

SEQ ID NO: 1668 - protein, 32 aa, synthetic construct
RFTFTADESTSTAYMELSNLRSEDTAVFYCAR

SEQ ID NO: 1669 - protein, 32 aa, synthetic construct
RVTFTLDESTSTAYMELSNLRSEDTAVFYCAR

SEQ ID NO: 1670 - protein, 32 aa, synthetic construct
RFTFTLDESTSTAYMELSNLRSEDTAVFYCAR

SEQ ID NO: 1671 - protein, 32 aa, synthetic construct
RVTLTADTSTDTAYMELSSLRSEDTAVYFCAR

SEQ ID NO: 1672 - protein, 32 aa, synthetic construct
RFTLTADTSTDTAYMELSSLRSEDTAVYFCAR

SEQ ID NO: 1673 - protein, 32 aa, synthetic construct
RVTFTADTSTDTAYMELSSLRSEDTAVYFCAR

SEQ ID NO: 1674 - protein, 32 aa, synthetic construct
RVTLTADTSTDTAYLELSSLRSEDTAVYFCAR

SEQ ID NO: 1675 - protein, 32 aa, synthetic construct
RFTFTADTSTDTAYMELSSLRSEDTAVYFCAR

SEQ ID NO: 1676 - protein, 32 aa, synthetic construct
RFTLTADTSTDTAYLELSSLRSEDTAVYFCAR

SEQ ID NO: 1677 - protein, 32 aa, synthetic construct
RVTFTADTSTDTAYLELSSLRSEDTAVYFCAR

SEQ ID NO: 1678 - protein, 32 aa, synthetic construct
RFTFTADTSTDTAYLELSSLRSEDTAVYFCAR

SEQ ID NO: 1679 - protein, 32 aa, synthetic construct
RATITADESTSTAYMELSSLRSEDTAVYYCAR

SEQ ID NO: 1680 - protein, 32 aa, synthetic construct
RVTLTADESTSTAYMELSSLRSEDTAVYYCAR

SEQ ID NO: 1681 - protein, 32 aa, synthetic construct
RVTITADKSTSTAYMELSSLRSEDTAVYYCAR

SEQ ID NO: 1682 - protein, 32 aa, synthetic construct
RATLTADESTSTAYMELSSLRSEDTAVYYCAR

SEQ ID NO: 1683 - protein, 32 aa, synthetic construct
RATITADKSTSTAYMELSSLRSEDTAVYYCAR

SEQ ID NO: 1684 - protein, 32 aa, synthetic construct
RVTLTADKSTSTAYMELSSLRSEDTAVYYCAR

SEQ ID NO: 1685 - protein, 32 aa, synthetic construct
RATLTADKSTSTAYMELSSLRSEDTAVYYCAR

SEQ ID NO: 1686 - protein, 32 aa, synthetic construct; identical to SEQ ID NO: 1679

SEQ ID NO: 1687 - protein, 32 aa, synthetic construct
RVTITADESSSTAYMELSSLRSEDTAVYYCAR

SEQ ID NO: 1688 - protein, 32 aa, synthetic construct
RVTITADESTSTAYLELSSLRSEDTAVYYCAR

SEQ ID NO: 1689 - protein, 32 aa, synthetic construct
RVTITADESTSTAYMELSRLRSEDTAVYYCAR

SEQ ID NO: 1690 - protein, 32 aa, synthetic construct
RATITADESSSTAYMELSSLRSEDTAVYYCAR

SEQ ID NO: 1691 - protein, 32 aa, synthetic construct
RATITADESTSTAYLELSSLRSEDTAVYYCAR

SEQ ID NO: 1692 - protein, 32 aa, synthetic construct
RATITADESTSTAYMELSRLRSEDTAVYYCAR

SEQ ID NO: 1693 - protein, 32 aa, synthetic construct
RVTLTADESSSTAYMELSSLRSEDTAVYYCAR

SEQ ID NO: 1694 - protein, 32 aa, synthetic construct
RVTLTADESTSTAYLELSSLRSEDTAVYYCAR

SEQ ID NO: 1695 - protein, 32 aa, synthetic construct
RVTLTADESTSTAYMELSRLRSEDTAVYYCAR

SEQ ID NO: 1696 - protein, 32 aa, synthetic construct
RVTITADESSSTAYLELSSLRSEDTAVYYCAR

SEQ ID NO: 1697 - protein, 32 aa, synthetic construct
RVTITADESSSTAYMELSRLRSEDTAVYYCAR

SEQ ID NO: 1698 - protein, 32 aa, synthetic construct
RVTITADESTSTAYLELSRLRSEDTAVYYCAR

SEQ ID NO: 1699 - protein, 32 aa, synthetic construct
RATLTADESSSTAYMELSSLRSEDTAVYYCAR

SEQ ID NO: 1700 - protein, 32 aa, synthetic construct
RATLTADESTSTAYLELSSLRSEDTAVYYCAR

SEQ ID NO: 1701 - protein, 32 aa, synthetic construct
RATLTADESTSTAYMELSRLRSEDTAVYYCAR

SEQ ID NO: 1702 - protein, 32 aa, synthetic construct
RATITADESSSTAYLELSSLRSEDTAVYYCAR

SEQ ID NO: 1703 - protein, 32 aa, synthetic construct
RATITADESSSTAYMELSRLRSEDTAVYYCAR

SEQ ID NO: 1704 - protein, 32 aa, synthetic construct
RATITADESTSTAYLELSRLRSEDTAVYYCAR

SEQ ID NO: 1705 - protein, 32 aa, synthetic construct
RVTLTADESSSTAYLELSSLRSEDTAVYYCAR

SEQ ID NO: 1706 - protein, 32 aa, synthetic construct
RVTLTADESSSTAYMELSRLRSEDTAVYYCAR

SEQ ID NO: 1707 - protein, 32 aa, synthetic construct
RVTLTADESTSTAYLELSRLRSEDTAVYYCAR

SEQ ID NO: 1708 - protein, 32 aa, synthetic construct
RVTITADESSSTAYLELSRLRSEDTAVYYCAR

SEQ ID NO: 1709 - protein, 32 aa, synthetic construct
RATLTADESSSTAYLELSSLRSEDTAVYYCAR

SEQ ID NO: 1710 - protein, 32 aa, synthetic construct
RATLTADESSSTAYMELSRLRSEDTAVYYCAR

SEQ ID NO: 1711 - protein, 32 aa, synthetic construct
RATLTADESTSTAYLELSRLRSEDTAVYYCAR

SEQ ID NO: 1712 - protein, 32 aa, synthetic construct
RATITADESSSTAYLELSRLRSEDTAVYYCAR

SEQ ID NO: 1713 - protein, 32 aa, synthetic construct
RVTLTADESSSTAYLELSRLRSEDTAVYYCAR

SEQ ID NO: 1714 - protein, 32 aa, synthetic construct
RATLTADESSSTAYLELSRLRSEDTAVYYCAR

SEQ ID NO: 1715 - protein, 32 aa, synthetic construct
RVTITRDTSASTAYMELSSLRSEDTAVYYCAR

SEQ ID NO: 1716 - protein, 32 aa, synthetic construct
RATITRDESASTAYMELSSLRSEDTAVYYCAR

SEQ ID NO: 1717 - protein, 32 aa, synthetic construct
RVTLTRDESASTAYMELSSLRSEDTAVYYCAR

SEQ ID NO: 1718 - protein, 32 aa, synthetic construct
RVTITRDKSASTAYMELSSLRSEDTAVYYCAR

SEQ ID NO: 1719 - protein, 32 aa, synthetic construct
RATLTRDESASTAYMELSSLRSEDTAVYYCAR

SEQ ID NO: 1720 - protein, 32 aa, synthetic construct
RATITRDKSASTAYMELSSLRSEDTAVYYCAR

SEQ ID NO: 1721 - protein, 32 aa, synthetic construct
RVTLTRDKSASTAYMELSSLRSEDTAVYYCAR

SEQ ID NO: 1722 - protein, 32 aa, synthetic construct
RATLTRDKSASTAYMELSSLRSEDTAVYYCAR

SEQ ID NO: 1723 - protein, 32 aa, synthetic construct
QVTISADKSISTAYLQWSSLKASDTAMYYCAR

SEQ ID NO: 1724 - protein, 32 aa, synthetic construct
QATISADKSISTAYLQWSSLKASDTAMYYCAR

SEQ ID NO: 1725 - protein, 32 aa, synthetic construct
QVTLSADKSISTAYLQWSSLKASDTAMYYCAR

SEQ ID NO: 1726 - protein, 32 aa, synthetic construct
QATLSADKSISTAYLQWSSLKASDTAMYYCAR

SEQ ID NO: 1727 - protein, 11 aa, synthetic construct
WGQGTLVTVSS

SEQ ID NO: 1728 - protein, 11 aa, synthetic construct
WGQGTTVTVSS

SEQ ID NO: 1729 - protein, 23 aa, synthetic construct
DVVMTQSPLSLPVTLGQPASISC

SEQ ID NO: 1730 - protein, 23 aa, synthetic construct
DVVLTQSPLSLPVTLGQPASISC

SEQ ID NO: 1731 - protein, 23 aa, synthetic construct
DVVLTQSPLSLPVTLGDPASISC

SEQ ID NO: 1732 - protein, 23 aa, synthetic construct
DVVLTQSPLSLPVTLGDPASISC

SEQ ID NO: 1733 - protein, 23 aa, synthetic construct
DIVMTQSPLSLPVTLGQPASISC

SEQ ID NO: 1734 - protein, 23 aa, synthetic construct
DIVLTQSPLSLPVTLGQPASISC

SEQ ID NO: 1735 - protein, 23 aa, synthetic construct
DVAMTQSPLSLPVTLGQPASISC

SEQ ID NO: 1736 - protein, 23 aa, synthetic construct
DVALTQSPLSLPVTLGQPASISC

SEQ ID NO: 1737 - protein, 23 aa, synthetic construct
DVVLTQTPLSLPVSPGDQASISC

SEQ ID NO: 1738 - protein, 23 aa, synthetic construct
DIVMTQTPLSLPVSPGDQASISC

SEQ ID NO: 1739 - protein, 23 aa, synthetic construct
DIVMTQTPLSLPVSPGDQASISC

SEQ ID NO: 1740 - protein, 23 aa, synthetic construct
DIVMTQTPLSLPVSPGDQASISC

SEQ ID NO: 1741 - protein, 23 aa, synthetic construct
DIELTQSPASLAVSLGQRATISC

SEQ ID NO: 1742 - protein, 23 aa, synthetic construct
DIVLTQSPASLAVSLGQRATISC

SEQ ID NO: 1743 - protein, 23 aa, synthetic construct
DIVMTQSPDSLAVSLGERATINC

SEQ ID NO: 1744 - protein, 23 aa, synthetic construct
DIVLTQSPDSLAVSLGERATINC

SEQ ID NO: 1745 - protein, 23 aa, synthetic construct
DIQMTQSPSSLSASVGDRVTITC

SEQ ID NO: 1746 - protein, 23 aa, synthetic construct
DIQLTQSPSSLSASVGDRVTITC

SEQ ID NO: 1747 - protein, 23 aa, synthetic construct
EIVLTQSPATLSLSPGERATLSC

SEQ ID NO: 1748 - protein, 23 aa, synthetic construct
EIVLTQSPATLSVSPGERATLSC

SEQ ID NO: 1749 - protein, 23 aa, synthetic construct
EIVLTQSPGTLSLSPGERATLSC

SEQ ID NO: 1750 - protein, 23 aa, synthetic construct
EVVLTQSPGTLSLSPGERATLSC

SEQ ID NO: 1751 - protein, 15 aa, synthetic construct
WFQQRPGQSPRRLIY

SEQ ID NO: 1752 - protein, 15 aa, synthetic construct
WYQQRPGQSPRRLIY

SEQ ID NO: 1753 - protein, 15 aa, synthetic construct
WFQQKPGQSPRRLIY

SEQ ID NO: 1754 - protein, 15 aa, synthetic construct
WFQQRPGQSPKRLIY

SEQ ID NO: 1755 - protein, 15 aa, synthetic construct
WFQQRPGQSPRLLIY

SEQ ID NO: 1756 - protein, 15 aa, synthetic construct
WYQQKPGQSPRRLIY

SEQ ID NO: 1757 - protein, 15 aa, synthetic construct
WYQQRPGQSPKRLIY

SEQ ID NO: 1758 - protein, 15 aa, synthetic construct
WYQQRPGQSPRLLIY

SEQ ID NO: 1759 - protein, 15 aa, synthetic construct
WFQQKPGQSPKRLIY

SEQ ID NO: 1760 - protein, 15 aa, synthetic construct
WFQQKPGQSPRLLIY

SEQ ID NO: 1761 - protein, 15 aa, synthetic construct
WFQQRPGQSPKLLIY

SEQ ID NO: 1762 - protein, 15 aa, synthetic construct
WYQQKPGQSPKRLIY

SEQ ID NO: 1763 - protein, 15 aa, synthetic construct
WYQQKPGQSPRLLIY

SEQ ID NO: 1764 - protein, 15 aa, synthetic construct
WYQQRPGQSPKLLIY

SEQ ID NO: 1765 - protein, 15 aa, synthetic construct
WFQQKPGQSPKLLIY

SEQ ID NO: 1766 - protein, 15 aa, synthetic construct
WYQQKPGQSPKLLIY

SEQ ID NO: 1767 - protein, 15 aa, synthetic construct
WLQQRPGQSPRRLIY

SEQ ID NO: 1768 - protein, 15 aa, synthetic construct
WLQQRPGQSPKRLIY

SEQ ID NO: 1769 - protein, 15 aa, synthetic construct
WFQQRPGQSPRRLIF

SEQ ID NO: 1770 - protein, 15 aa, synthetic construct
WYQQRPGQSPRRLIF

SEQ ID NO: 1771 - protein, 15 aa, synthetic construct
WFQQRPGQSPRLLIF

SEQ ID NO: 1772 - protein, 15 aa, synthetic construct
WYQQRPGQSPRLLIF

SEQ ID NO: 1773 - protein, 15 aa, synthetic construct
WYLQKPGQSPKLLIY

SEQ ID NO: 1774 - protein, 15 aa, synthetic construct
WYQQKPGQPPKLLIY

SEQ ID NO: 1775 - protein, 15 aa, synthetic construct
WYQQKPGKAPKLLIY

SEQ ID NO: 1776 - protein, 15 aa, synthetic construct
WYQQKPGQAPRLLIY

SEQ ID NO: 1777 - protein, 15 aa, synthetic construct
WYQQKPGQAPRLLIF

SEQ ID NO: 1778 - protein, 32 aa, synthetic construct
GVPDRFSGSGSGTDFTLKISRVEAEDVGVYYC

SEQ ID NO: 1779 - protein, 32 aa, synthetic construct
GVPDRFSGSGSGADFTLKISRVEAEDVGVYYC

SEQ ID NO: 1780 - protein, 32 aa, synthetic construct
GVPDRFSGSGSGTDFTLKISRVEAEDVGVYFC

SEQ ID NO: 1781 - protein, 32 aa, synthetic construct
GVPDRFSGSGSRTDFTLKISRVEAEDVGVYYC

SEQ ID NO: 1782 - protein, 32 aa, synthetic construct
GVPDRFSGSGSGTDFTLTISSLQAEDVAVYYC

SEQ ID NO: 1783 - protein, 32 aa, synthetic construct
GVPDRFSGSGSRTDFTLTISSLQAEDVAVYYC

SEQ ID NO: 1784 - protein, 32 aa, synthetic construct
GVPDRFSGSGSGTDFTLTISSVQAEDVAVYYC

SEQ ID NO: 1785 - protein, 32 aa, synthetic construct
GVPDRFSGSGSRTDFTLTISSVQAEDVAVYYC

SEQ ID NO: 1786 - protein, 32 aa, synthetic construct
GVPSRFSGSGSGTDFTLTISSLQPEDFATYYC

SEQ ID NO: 1787 - protein, 32 aa, synthetic construct
GVPSRFSGSGSGTDFTLTISSVQPEDFATYYC

SEQ ID NO: 1788 - protein, 32 aa, synthetic construct
GIPARFSGSGSGTDFTLTISSLEPEDFAVYYC

SEQ ID NO: 1789 - protein, 32 aa, synthetic construct
GVPARFSGSGSGTDFTLTISSLEPEDFAVYYC

SEQ ID NO: 1790 - protein, 32 aa, synthetic construct
GIPARFSGSGSGTDFTLTISSVEPEDFAVYYC

SEQ ID NO: 1791 - protein, 32 aa, synthetic construct
GVPARFSGSGSGTDFTLTISSVEPEDFAVYYC

SEQ ID NO: 1792 - protein, 32 aa, synthetic construct
GIPDRFSGSGSGTDFTLTISRLEPEDFAVYYC

SEQ ID NO: 1793 - protein, 10 aa, synthetic construct
FGGGTKVEIK

SEQ ID NO: 1794 - protein, 10 aa, synthetic construct
FGSGTKLEIK

SEQ ID NO: 1795 - protein, 8 aa, synthetic construct
GFTFTDYY

SEQ ID NO: 1796 - protein, 7 aa, synthetic construct
GFTFTDY

SEQ ID NO: 1797 - protein, 394 aa, Homo sapiens
MIVFIFLAMGLSLENEYTSQTNNCTYLREQCLRDANGCKHAWRVMEDACNDSDPGDPCKMRNSSYCNLSIQYLVESNFQFKECLCTDDFYCTVNKLLGKKCINKSDNVKEDKFKWNLTTRSHHGFKGMWSCLEVAEACVGDVVCNAQLASYLKACSANGNPCDLKQCQAAIRFFYQNIPFNIAQMLAFCDCAQSDIPCQQSKEALHSKTCAVNMVPPPTCLSVIRSCQNDELCRRHYRTFQSKCWQRVTRKCHEDENCISTLSKQDLTCSGSDDCKAAYIDILGTVLQVQCTCRTITQSEESLCKIFQHMLHRKSCFNYPTLSNVKGMALYTRKHANKITLTGFHSPFNGEVIYAAMCMTVTCGILLLVMVKLRTSRISSKARDPSSIQIPGEL

SEQ ID NO: 1798 - protein, 375 aa, Homo sapiens
QTNNCTYLREQCLRDANGCKHAWRVMEDACNDSDPGDPCKMRNSSYCNLSIQYLVESNFQFKECLCTDDFYCTVNKLLGKKCINKSDNVKEDKFKWNLTTRSHHGFKGMWSCLEVAEACVGDVVCNAQLASYLKACSANGNPCDLKQCQAAIRFFYQNIPFNIAQMLAFCDCAQSDIPCQQSKEALHSKTCAVNMVPPPTCLSVIRSCQNDELCRRHYRTFQSKCWQRVTRKCHEDENCISTLSKQDLTCSGSDDCKAAYIDILGTVLQVQCTCRTITQSEESLCKIFQHMLHRKSCFNYPTLSNVKGMALYTRKHANKITLTGFHSPFNGEVIYAAMCMTVTCGILLLVMVKLRTSRISSKARDPSSIQIPGEL

SEQ ID NO: 1799 - DNA, 1911 bp, synthetic construct
  source 1..1911: mol_type = other DNA
ttattctggacagttactcttaagaaagttgtcagaagaaacgcatctgcctttttttccaggtgaactgccgtgagttgtccagcatgatagtgtttattttcttggctatggggttaagcttggaaaatgaatacacttcccaaaccaataattgcacatatttaagagagcaatgcttacgtgatgcaaatggatgtaaacatgcttggagagtaatggaagatgcctgcaatgattcagatccaggtgacccctgcaagatgaggaattcatcatactgtaacctgagtatccagtacttagtggaaagcaatttccaatttaaagagtgtctttgcactgatgacttctattgtactgtgaacaaactgcttggaaaaaaatgtatcaataaatcagataacgtgaaagaggataaattcaaatggaatctaactacacgttcccatcatggattcaaagggatgtggtcctgtttggaagtggcagaggcatgtgtaggggatgtggtctgtaatgcacagttggcctcttaccttaaagcttgctcagcaaatggaaatccgtgtgatctgaaacagtgccaagcagccatacggttcttctatcaaaatataccttttaacattgcccagatgttggctttttgtgactgtgctcaatctgatataccttgtcagcagtccaaagaagctcttcacagcaagacatgtgcagtgaacatggttccaccccctacttgcctcagtgtaattcgcagctgccaaaatgatgaattatgcaggaggcactatagaacatttcagtcaaaatgctggcagcgtgtgactagaaagtgccatgaagatgagaattgcattagcaccttaagcaaacaggacctcacttgttcaggaagtgatgactgcaaagctgcttacatagatatccttgggacggtccttcaagtgcaatgtacctgtaggaccattacacaaagtgaggaatctttgtgtaagattttccagcacatgcttcatagaaaatcatgtttcaattatccaaccctgtctaatgtcaaaggcatggcattgtatacaagaaaacatgcaaacaaaatcactttaactggatttcattcccccttcaatggagaagtaatctatgctgccatgtgcatgacagtcacctgtggaatccttctgttggttatggtcaagcttagaacttccagaatatcaagtaaagcaagagatccttcatcgatccaaatacctggagaactctgattcattaggagtcatggacctataacaatcactcttttctctgcttttcttctttcctcttttcttctctcctctcctctcctctcttctcctctcctcccctcccctctctgtttctttttctttttcttttcttttttgtggcggagttttgctcttgttgcccaggctgcagtacaatggctcaatctcggttcactgcaacctctgcctccaaggttcaagtgattttcctgcctcagccttcccgagtagctgggattacaggtacccgccaccacgcccagctaatttttttgtatttttagtagagatggggttttgccaaattggccagggtggtctcaaactcctgacctcaggtgatccacccacctcggcctcccaaagtgctgggattacaggcgtgagcaaccacgtcaagacaacaatcactttctttaaagcaaatcctacagctggtcaacaccctattccatctgtcatcgagaaagaaaatgttaaaatagacttaaaaatattgctttgttacatataataatatggcatgatgatgttatttttttcttaatactcaagaaaaaatatatggtggtatcttttacaacactggaacagaaataaagtttcccttgaaggc

SEQ ID NO: 1800 - protein, 394 aa, Macaca fascicularis
MIVLIFLALGLSLENEYTSQTNNCTYLREQCLHDANGCKHAWRIMEDACNDSDPGDPCKMNNSSYCNLSIQYLVESNFRFKECLCTDDFYCTVNKLLGKECVNKSDNMREDKFKWNLTTHSHHGFKGMWSCLEVAEACVGDVVCNAQLASYLKACSANGNPCDVKHCQAAIRFFYQNIPFNIAQMLAFCDCSQSDIPCQQSKEALHSKPCALNMVPPPTCLNVIRSCQNDELCRRHYRTFQSKCWQRVTRKCHEDENCISALSKQDLTCSGSDDCKAAYIDILGTVLQVQCNCRTITQSEESLCKIFQHMLHRKSCFNYPTLSNVKSMALYTRKHTNKITLTGFQSPFNGEVIYAAMCMTVTCGILLLVMVKLRTSRISSKARDPSLSQVPGEL

SEQ ID NO: 1801 - DNA, 1476 bp, Macaca fascicularis
  source 1..1476: mol_type = genomic DNA
acccaccagaaagaaggagctccagacacatctgaacgtctgaaggaagaaactcccgacacaccatctttaagaaatgtaactctcactgcgagggtatgtggcttcattcttgaagtcagggagaccaagaacccaccaattgcaggcacacaaggggtccttattttattcaggtgaacagctgtgagttgtccagcatgatagtgcttattttcttggctttggggctaagcttggaaaatgaatacacttcccaaaccaataattgcacatatttaagagagcaatgcctacatgatgcaaatggatgtaaacatgcttggagaataatggaagatgcctgcaatgattcagatccaggtgacccctgcaagatgaataattcatcatactgtaacctgagtatccagtacttagtggaaagcaatttccgatttaaagagtgtctttgcactgatgacttctattgtactgtgaacaaactgcttggaaaagaatgtgtcaataaatcagataacatgagagaggataaattcaaatggaatctaactacacattcccatcatggattcaaagggatgtggtcctgtttggaagtggcagaggcatgtgtaggggatgtggtctgtaatgcacagttggcctcttaccttaaagcttgctcagcaaatggaaatccgtgtgatgtgaaacactgccaagcagccatacggttcttctatcaaaatataccttttaacattgcccagatgttggctttttgtgactgttctcaatctgatataccttgtcagcagtccaaagaagctcttcacagcaagccatgtgcactgaacatggttccaccccctacttgcctcaatgtaattcgcagctgccaaaatgatgaattatgcaggaggcactatagaacatttcagtcaaaatgctggcagcgtgtgactagaaagtgccatgaagatgagaattgcattagcgccttaagcaaacaggacctcacatgttcaggaagtgatgactgcaaagctgcttacatagatatccttgggacagtccttcaagtgcaatgtaactgtaggaccattacacaaagtgaggaatctttgtgcaagattttccagcacatgcttcatagaaaatcatgtttcaattatccaaccctgtctaatgtcaaaagcatggcattgtatacaagaaaacatacaaacaaaatcactttaactggatttcagtcccccttcaatggagaagtaatctatgctgccatgtgcatgacagtcacctgtggaatccttctcttggttatggtcaagcttagaacttccagaatatcaagtaaagcaagagatccttcactgagccaagtacctggagaactctgattcattaggagtcatggacccataacaatcactccccttcccttcccttcccttcccttcccttcccttcccttcccttcccttcccttcc

SEQ ID NO: 1802 - protein, 393 aa, Mus musculus
MLVFIFLAVTLSSENESSSQTNDCAHLIQKCLIDANGCEQSWRSMEDTCLTPGDSCKINNSLHCNLSIQALVEKNFQFKECLCMDDLHCTVNKLFGKKCTNKTDNMEKDNKDKWNLTTTPFYHGFKQMQSCLEVTEACVGDVVCNAQLALYLKACSANGNLCDVKHCQAAIRFFYQNMPFNTAQMLAFCDCAQSDIPCQQSKETLHSKPCALNIVPPPTCLSVIHTCRNDELCRTHYRTFQTECWPHITGKCHEDETCISMLGKQDLTCSGSESCRAAFLGTFGTVLQVPCACRGVTQAEEHVCMIFQHMLHSKSCFNYPTPNVKDISSYEKKNSKEITLTGFNSFFNGELLYVVVCMAVTCGILFLVMLKLRIQSEKRDPSSIEIAGGVIIQ

SEQ ID NO: 1803 - DNA, 2080 bp, Mus musculus
  source 1..2080: mol_type = genomic DNA
aacaattgaatttgaatacaattaggaaagttcacagctcaaaacaaactggtgaggaacagctgacaccagaagctgactctaattggctggctcttaggaagcaaaacctttacacagaaacttcagttgggatgttggttggtgtcagttcatccgcctttctcccagggagaccatcttgagttgtccaacatgctagtgttcattttcctggctgttacgttaagctcagaaaatgaatcctcttcccaaacaaatgattgtgcacatttaatacagaaatgcttgattgatgcaaatggctgtgagcagtcatggagatcaatggaagacacctgccttactccaggtgactcctgcaagataaataattcactacattgtaacctgagtatccaggctttggtggaaaaaaatttccaatttaaagagtgtctttgtatggatgacctccactgtacagtaaacaaactttttggaaaaaagtgcaccaataagacagataacatggaaaaggacaataaagataaatggaatctaactactactcctttctatcatggattcaaacagatgcagtcttgtttggaggtgacagaggcgtgtgtaggggatgtggtttgtaatgcacagttggccctttaccttaaagcatgctcagcaaatggaaatctgtgtgatgtgaaacactgccaagcagccatacggttcttctatcaaaatatgccttttaacactgcccagatgttggctttttgtgactgtgctcaatctgatataccctgtcagcaatccaaagaaactcttcacagcaagccatgtgcactgaatatagttccaccccccacttgcctcagtgtaattcacacttgccgaaatgatgaattatgcaggacacactaccgaacattccagacagaatgctggccccacataactgggaagtgccatgaagatgagacctgcattagcatgttaggcaagcaagaccttacttgttctgggagtgagagctgcagggctgccttcctaggaacctttgggacagtcctgcaagtaccctgtgcttgcaggggcgttacacaggctgaagaacacgtgtgcatgattttccagcacatgcttcatagcaaatcgtgtttcaattacccaactcctaatgtcaaagacatttcctcatatgaaaaaaagaattcaaaagaaattactctgactggattcaattctttcttcaatggagaactactctatgttgttgtgtgcatggcagttacctgtggaattcttttcttggtgatgctcaagttaaggatacaaagtgaaaaaagagatccctcatccatcgaaatagctggaggtgtcatcattcagtgagctgcagatcacttaccaaccacatgtctgtgtgactaaccaatggaaaattacatttgccaataacgcaatttaagatggatttgacaatatttagtcattatatgtaacagtgactggtacagtaatataccacaatgatcacagatctgtttttgtttttgtttttaatgtttgagtaaatacttgttgtggtgtcataactagttgataacattttctttaaagacaacaggtgtcatgtaaaatgtgacaaatttgctggaagactatcaatccacatatcaacttctatcttatggaactaatcataattagtgtgtgcagttttctgaacaaggttatagttttccattaagttggtaaaattaaaatgctaagtagaatattgagtatacttgttatttatatattcttacttagtgtccaatcattaaacaaattggtaacattgaacatatttagttagatgactgcttatgaaaataagaactgacatcttacaaattttataatttaaatagtattgaattttactttttatttggtatgttaagattcataatatataaagcagctacattggttgagaaaagtcaatggttactccagtaatgatatactttgtgaatttatttatttttgctaattaatgatcctgaatgtaatcatgatgaaataaaaaagacatacttaaattgct

SEQ ID NO: 1804 - protein, 394 aa, Rattus norvegicus
MLVFIFLAVRLSSENESSSQTNDCAYFMRQCLTDTDGCKQSWRSMEDACLVSGDSCKINNPLPCNLSIQSLVEKHFQFKGCLCTDDLHCTVNKIFGKKCTNKTDSMKKDNKYKRNLTTPLYHDTGFKQMQSCLEVTEACVGDVVCNAQLALYLKACTANGNLCDVKHCQAAIRFFYQNMPFNTAQMLAFCDCAQSDIPCQQSKETLHSKPCALNVVPPPTCLSVIHTCRNDELCRTYYRTFQTECWPHVAGKCREDETCISMLGKQDLTCSGSDSCRAAYLGTFGTVLQVPCACRSITQGEEPLCMAFQHMLHSKSCFNYPTPNVKDISSYERKHSKEITLTGFNSPFSGELIYVVVCMVVTSGILSLVMLKLRIPSKKRDPAPIEIAGAVIIQ

SEQ ID NO: 1805 - DNA, 1125 bp, Rattus norvegicus
  source 1..1125: mol_type = genomic DNA
acaaatgattgtgcatatttcatgcggcaatgcttgactgatacagatggctgtaagcagtcatggagatcaatggaagacgcctgccttgtctcaggtgactcctgcaagataaataatccattgccttgtaacctgagtatccagtctttggtggaaaaacattttcaatttaaagggtgtctttgcactgatgatctccactgtacagtaaacaaaatttttggaaaaaagtgcaccaataagacagatagcatgaaaaaagataataaatacaaacggaatctaactactcctttatatcatgatacaggattcaaacagatgcagtcttgtttggaagtgacagaggcgtgtgtaggggatgtggtttgtaatgcacagttggccctttaccttaaagcatgcacagcaaatggaaatctgtgtgatgtgaaacactgccaagcggccatacggttcttctatcaaaatatgccttttaacactgcccagatgttggctttttgtgactgtgctcaatctgatataccctgtcaacaatccaaagaaactcttcacagcaagccatgtgcactgaacgtagttccaccccccacttgcctcagtgtaattcacacttgccgaaatgatgaattatgcaggacatactaccgaacattccagacagaatgctggccccatgtggctgggaagtgtcgtgaagatgagacctgcattagtatgctgggcaagcaagaccttacttgttctgggagtgacagctgcagggcagcctacctaggaaccttcgggacagtccttcaggtgccgtgtgcttgcagaagcatcacacagggtgaagaacccttgtgcatggctttccagcacatgcttcacagcaaatcatgtttcaattacccaactcctaatgtcaaagacatttcctcatatgaaagaaagcattcaaaagaaattaccctgactggattcaattctcccttcagtggagaactaatctatgttgttgtgtgcatggtagttaccagcgggattctttccttggtgatgctcaagctaaggatacctagtaagaaaagagaccccgcgcccatcgaaatagctggagctgtcatcattcagtga

SEQ ID NO: 1806 - protein, 332 aa, Homo sapiens
QTNNCTYLREQCLRDANGCKHAWRVMEDACNDSDPGDPCKMRNSSYCNLSIQYLVESNFQFKECLCTDDFYCTVNKLLGKKCINKSDNVKEDKFKWNLTTRSHHGFKGMWSCLEVAEACVGDVVCNAQLASYLKACSANGNPCDLKQCQAAIRFFYQNIPFNIAQMLAFCDCAQSDIPCQQSKEALHSKTCAVNMVPPPTCLSVIRSCQNDELCRRHYRTFQSKCWQRVTRKCHEDENCISTLSKQDLTCSGSDDCKAAYIDILGTVLQVQCTCRTITQSEESLCKIFQHMLHRKSCFNYPTLSNVKGMALYTRKHANKITLTGFHSPFNGE

SEQ ID NO: 1807 - protein, 351 aa, synthetic construct
MIVFIFLAMGLSLENEYTSQTNNCTYLREQCLRDANGCKHAWRVMEDACNDSDPGDPCKMRNSSYCNLSIQYLVESNFQFKECLCTDDFYCTVNKLLGKKCINKSDNVKEDKFKWNLTTRSHHGFKGMWSCLEVAEACVGDVVCNAQLASYLKACSANGNPCDLKQCQAAIRFFYQNIPFNIAQMLAFCDCAQSDIPCQQSKEALHSKTCAVNMVPPPTCLSVIRSCQNDELCRRHYRTFQSKCWQRVTRKCHEDENCISTLSKQDLTCSGSDDCKAAYIDILGTVLQVQCTCRTITQSEESLCKIFQHMLHRKSCFNYPTLSNVKGMALYTRKHANKITLTGFHSPFNGE

SEQ ID NO: 1808 - protein, 297 aa, Homo sapiens
QTNNCTYLREQCLRDANGCKHAWRVMEDACNDSDPGDPCKMRNSSYCNLSIQYLVESNFQFKECLCTDDFYCTVNKLLGKKCINKSDNVKEDKFKWNLTTRSHHGFKGMWSCLEVAEACVGDVVCNAQLASYLKACSANGNPCDLKQCQAAIRFFYQNIPFNIAQMLAFCDCAQSDIPCQQSKEALHSKTCAVNMVPPPTCLSVIRSCQNDELCRRHYRTFQSKCWQRVTRKCHEDENCISTLSKQDLTCSGSDDCKAAYIDILGTVLQVQCTCRTITQSEESLCKIFQHMLHRKSC

SEQ ID NO: 1809 - protein, 237 aa, Homo sapiens
WNLTTRSHHGFKGMWSCLEVAEACVGDVVCNAQLASYLKACSANGNPCDLKQCQAAIRFFYQNIPFNIAQMLAFCDCAQSDIPCQQSKEALHSKTCAVNMVPPPTCLSVIRSCQNDELCRRHYRTFQSKCWQRVTRKCHEDENCISTLSKQDLTCSGSDDCKAAYIDILGTVLQVQCTCRTITQSEESLCKIFQHMLHRKSCFNYPTLSNVKGMALYTRKHANKITLTGFHSPFNGE

SEQ ID NO: 1810 - protein, 308 aa, Homo sapiens
MPGQELRTVNGSQMLLVLLVLSWLPHGGALSLAEASRASFPGPSELHSEDSRFRELRKRYEDLLTRLRANQSWEDSNTDLVPAPAVRILTPEVRLGSGGHLHLRISRAALPEGLPEASRLHRALFRLSPTASRSWDVTRPLRRQLSLARPQAPALHLRLSPPPSQSDQLLAESSSARPQLELHLRPQAARGRRRARARNGDHCPLGPGRCCRLHTVRASLEDLGWADWVLSPREVQVTMCIGACPSQFRAANMHAQIKTSLHRLKPDTVPAPCCVPASYNPMVLIQKTDTGVSLQTYDDLLAKDCHCI

SEQ ID NO: 1811 - protein, 112 aa, Homo sapiens
ARNGDHCPLGPGRCCRLHTVRASLEDLGWADWVLSPREVQVTMCIGACPSQFRAANMHAQIKTSLHRLKPDTVPAPCCVPASYNPMVLIQKTDTGVSLQTYDDLLAKDCHCI

SEQ ID NO: 1812 - protein, 1049 aa, Homo sapiens
KVALGLYFSRDAYWEKLYVDQAAGTPLLYVHALRDAPEEVPSFRLGQHLYGTYRTRLHENNWICIQEDTGLLYLNRSLDHSSWEKLSVRNRGFPLLTVYLKVFLSPTSLREGECQWPGCARVYFSFFNTSFPACSSLKPRELCFPETRPSFRIRENRPPGTFHQFRLLPVQFLCPNISVAYRLLEGEGLPFRCAPDSLEVSTRWALDREQREKYELVAVCTVHAGAREEVVMVPFPVTVYDEDDSAPTFPAGVDTASAVVEFKRKEDTVVATLRVFDADVVPASGELVRRYTSTLLPGDTWAQQTFRVEHWPNETSVQANGSFVRATVHDYRLVLNRNLSISENRTMQLAVLVNDSDFQGPGAGVLLLHFNVSVLPVSLHLPSTYSLSVSRRARRFAQIGKVCVENCQAFSGINVQYKLHSSGANCSTLGVVTSAEDTSGILFVNDTKALRRPKCAELHYMVVATDQQTSRQAQAQLLVTVEGSYVAEEAGCPLSCAVSKRRLECEECGGLGSPTGRCEWRQGDGKGITRNFSTCSPSTKTCPDGHCDVVETQDINICPQDCLRGSIVGGHEPGEPRGIKAGYGTCNCFPEEEKCFCEPEDIQDPLCDELCRTVIAAAVLFSFIVSVLLSAFCIHCYHKFAHKPPISSAEMTFRRPAQAFPVSYSSSGARRPSLDSMENQVSVDAFKILEDPKWEFPRKNLVLGKTLGEGEFGKVVKATAFHLKGRAGYTTVAVKMLKENASPSELRDLLSEFNVLKQVNHPHVIKLYGACSQDGPLLLIVEYAKYGSLRGFLRESRKVGPGYLGSGGSRNSSSLDHPDERALTMGDLISFAWQISQGMQYLAEMKLVHRDLAARNILVAEGRKMKISDFGLSRDVYEEDSYVKRSQGRIPVKWMAIESLFDHIYTTQSDVWSFGVLLWEIVTLGGNPYPGIPPERLFNLLKTGHRMERPDNCSEEMYRLMLQCWKQEPDKRPVFADISKDLEKMMVKRRDYLDLAASTPSDSLIYDDGLSEEETPLVDCNNAPLPRALPSTWIENKLYGRISHAFTRF

SEQ ID NO: 1813 - protein, 1072 aa, Homo sapiens
MAKATSGAAGLRLLLLLLLPLLGKVALGLYFSRDAYWEKLYVDQAAGTPLLYVHALRDAPEEVPSFRLGQHLYGTYRTRLHENNWICIQEDTGLLYLNRSLDHSSWEKLSVRNRGFPLLTVYLKVFLSPTSLREGECQWPGCARVYFSFFNTSFPACSSLKPRELCFPETRPSFRIRENRPPGTFHQFRLLPVQFLCPNISVAYRLLEGEGLPFRCAPDSLEVSTRWALDREQREKYELVAVCTVHAGAREEVVMVPFPVTVYDEDDSAPTFPAGVDTASAVVEFKRKEDTVVATLRVFDADVVPASGELVRRYTSTLLPGDTWAQQTFRVEHWPNETSVQANGSFVRATVHDYRLVLNRNLSISENRTMQLAVLVNDSDFQGPGAGVLLLHFNVSVLPVSLHLPSTYSLSVSRRARRFAQIGKVCVENCQAFSGINVQYKLHSSGANCSTLGVVTSAEDTSGILFVNDTKALRRPKCAELHYMVVATDQQTSRQAQAQLLVTVEGSYVAEEAGCPLSCAVSKRRLECEECGGLGSPTGRCEWRQGDGKGITRNFSTCSPSTKTCPDGHCDVVETQDINICPQDCLRGSIVGGHEPGEPRGIKAGYGTCNCFPEEEKCFCEPEDIQDPLCDELCRTVIAAAVLFSFIVSVLLSAFCIHCYHKFAHKPPISSAEMTFRRPAQAFPVSYSSSGARRPSLDSMENQVSVDAFKILEDPKWEFPRKNLVLGKTLGEGEFGKVVKATAFHLKGRAGYTTVAVKMLKENASPSELRDLLSEFNVLKQVNHPHVIKLYGACSQDGPLLLIVEYAKYGSLRGFLRESRKVGPGYLGSGGSRNSSSLDHPDERALTMGDLISFAWQISQGMQYLAEMKLVHRDLAARNILVAEGRKMKISDFGLSRDVYEEDSYVKRSQGRIPVKWMAIESLFDHIYTTQSDVWSFGVLLWEIVTLGGNPYPGIPPERLFNLLKTGHRMERPDNCSEEMYRLMLQCWKQEPDKRPVFADISKDLEKMMVKRRDYLDLAASTPSDSLIYDDGLSEEETPLVDCNNAPLPRALPSTWIENKLYGRISHAFTRF

SEQ ID NO: 1814 - protein, 612 aa, synthetic construct
KVALGLYFSRDAYWEKLYVDQAAGTPLLYVHALRDAPEEVPSFRLGQHLYGTYRTRLHENNWICIQEDTGLLYLNRSLDHSSWEKLSVRNRGFPLLTVYLKVFLSPTSLREGECQWPGCARVYFSFFNTSFPACSSLKPRELCFPETRPSFRIRENRPPGTFHQFRLLPVQFLCPNISVAYRLLEGEGLPFRCAPDSLEVSTRWALDREQREKYELVAVCTVHAGAREEVVMVPFPVTVYDEDDSAPTFPAGVDTASAVVEFKRKEDTVVATLRVFDADVVPASGELVRRYTSTLLPGDTWAQQTFRVEHWPNETSVQANGSFVRATVHDYRLVLNRNLSISENRTMQLAVLVNDSDFQGPGAGVLLLHFNVSVLPVSLHLPSTYSLSVSRRARRFAQIGKVCVENCQAFSGINVQYKLHSSGANCSTLGVVTSAEDTSGILFVNDTKALRRPKCAELHYMVVATDQQTSRQAQAQLLVTVEGSYVAEEAGCPLSCAVSKRRLECEECGGLGSPTGRCEWRQGDGKGITRNFSTCSPSTKTCPDGHCDVVETQDINICPQDCLRGSIVGGHEPGEPRGIKAGYGTCNCFPEEEKCFCEPEDIQDPLCDELCR

SEQ ID NO: 1815 - protein, 607 aa, synthetic construct
LYFSRDAYWEKLYVDQAAGTPLLYVHALRDAPEEVPSFRLGQHLYGTYRTRLHENNWICIQEDTGLLYLNRSLDHSSWEKLSVRNRGFPLLTVYLKVFLSPTSLREGECQWPGCARVYFSFFNTSFPACSSLKPRELCFPETRPSFRIRENRPPGTFHQFRLLPVQFLCPNISVAYRLLEGEGLPFRCAPDSLEVSTRWALDREQREKYELVAVCTVHAGAREEVVMVPFPVTVYDEDDSAPTFPAGVDTASAVVEFKRKEDTVVATLRVFDADVVPASGELVRRYTSTLLPGDTWAQQTFRVEHWPNETSVQANGSFVRATVHDYRLVLNRNLSISENRTMQLAVLVNDSDFQGPGAGVLLLHFNVSVLPVSLHLPSTYSLSVSRRARRFAQIGKVCVENCQAFSGINVQYKLHSSGANCSTLGVVTSAEDTSGILFVNDTKALRRPKCAELHYMVVATDQQTSRQAQAQLLVTVEGSYVAEEAGCPLSCAVSKRRLECEECGGLGSPTGRCEWRQGDGKGITRNFSTCSPSTKTCPDGHCDVVETQDINICPQDCLRGSIVGGHEPGEPRGIKAGYGTCNCFPEEEKCFCEPEDIQDPLCDELCR

SEQ ID NO: 1816 - protein, 607 aa, synthetic construct; identical to SEQ ID NO: 1815

SEQ ID NO: 1817 - protein, 419 aa, synthetic construct
MDMRVPAQLLGLLLLWLRGARCDYKDDDDKSAGGDYKDDDDKGGQTNNCTYLREQCLRDANGCKHAWRVMEDACNDSDPGDPCKMRNSSYCNLSIQYLVESNFQFKECLCTDDFYCTVNKLLGKKCINKSDNVKEDKFKWNLTTRSHHGFKGMWSCLEVAEACVGDVVCNAQLASYLKACSANGNPCDLKQCQAAIRFFYQNIPFNIAQMLAFCDCAQSDIPCQQSKEALHSKTCAVNMVPPPTCLSVIRSCQNDELCRRHYRTFQSKCWQRVTRKCHEDENCISTLSKQDLTCSGSDDCKAAYIDILGTVLQVQCTCRTITQSEESLCKIFQHMLHRKSCFNYPTLSNVKGMALYTRKHANKITLTGFHSPFNGEVIYAAMCMTVTCGILLLVMVKLRTSRISSKARDPSSIQIPGEL

SEQ ID NO: 1818 - protein, 233 aa, synthetic construct
MDMRVPAQLLGLLLLWLRGARCDYKDDDDKSAGGDYKDDDDKGGQTNNCTYLREQCLRDANGCKHAWRVMEDACNDSDPGDPCKMRNSSYCNLSIQYLVESNFQFKECLCTDDFYCTVNKLLGKKCINKSDNVKEDKFKWNLTTRSHHGFKGMWSFNYPTLSNVKGMALYTRKHANKITLTGFHSPFNGEVIYAAMCMTVTCGILLLVMVKLRTSRISSKARDPSSIQIPGEL

SEQ ID NO: 1819 - protein, 212 aa, synthetic construct
MDMRVPAQLLGLLLLWLRGARCDYKDDDDKSAGGDYKDDDDKGGSHHGFKGMWSCLEVAEACVGDVVCNAQLASYLKACSANGNPCDLKQCQAAIRFFYQNIPFNIAQMLAFCDCAQSDIPCQQSKEALHSKTCFNYPTLSNVKGMALYTRKHANKITLTGFHSPFNGEVIYAAMCMTVTCGILLLVMVKLRTSRISSKARDPSSIQIPGEL

SEQ ID NO: 1820 - protein, 313 aa, synthetic construct
MDMRVPAQLLGLLLLWLRGARCDYKDDDDKSAGGDYKDDDDKGGQTNNCTYLREQCLRDANGCKHAWRVMEDACNDSDPGDPCKMRNSSYCNLSIQYLVESNFQFKECLCTDDFYCTVNKLLGKKCINKSDNVKEDKFKWNLTTRSHHGFKGMWSCLEVAEACVGDVVCNAQLASYLKACSANGNPCDLKQCQAAIRFFYQNIPFNIAQMLAFCDCAQSDIPCQQSKEALHSKTCFNYPTLSNVKGMALYTRKHANKITLTGFHSPFNGEVIYAAMCMTVTCGILLLVMVKLRTSRISSKARDPSSIQIPGEL

SEQ ID NO: 1821 - protein, 330 aa, synthetic construct
MDMRVPAQLLGLLLLWLRGARCDYKDDDDKSAGGDYKDDDDKGGQTNNCTYLREQCLRDANGCKHAWRVMEDACNDSDPGDPCKMRNSSYCNLSIQYLVESNFQFKECLCTDDFYCTVNKLLGKKCINKSDNVKEDKFKWNLTTRSHHGFKGMWSCLSVIRSCQNDELCRRHYRTFQSKCWQRVTRKCHEDENCISTLSKQDLTCSGSDDCKAAYIDILGTVLQVQCTCRTITQSEESLCKIFQHMLHRKSCFNYPTLSNVKGMALYTRKHANKITLTGFHSPFNGEVIYAAMCMTVTCGILLLVMVKLRTSRISSKARDPSSIQIPGEL

SEQ ID NO: 1822 - protein, 318 aa, synthetic construct
MDMRVPAQLLGLLLLWLRGARCDYKDDDDKSAGGDYKDDDDKGGSHHGFKGMWSCLEVAEACVGDVVCNAQLASYLKACSANGNPCDLKQCQAAIRFFYQNIPFNIAQMLAFCDCAQSDIPCQQSKEALHSKTCAVNMVPPPTCLSVIRSCQNDELCRRHYRTFQSKCWQRVTRKCHEDENCISTLSKQDLTCSGSDDCKAAYIDILGTVLQVQCTCRTITQSEESLCKIFQHMLHRKSCFNYPTLSNVKGMALYTRKHANKITLTGFHSPFNGEVIYAAMCMTVTCGILLLVMVKLRTSRISSKARDPSSIQIPGEL

SEQ ID NO: 1823 - protein, 228 aa, synthetic construct
MDMRVPAQLLGLLLLWLRGARCDYKDDDDKSAGGDYKDDDDKGGAVNMVPPPTCLSVIRSCQNDELCRRHYRTFQSKCWQRVTRKCHEDENCISTLSKQDLTCSGSDDCKAAYIDILGTVLQVQCTCRTITQSEESLCKIFQHMLHRKSCFNYPTLSNVKGMALYTRKHANKITLTGFHSPFNGEVIYAAMCMTVTCGILLLVMVKLRTSRISSKARDPSSIQIPGEL

SEQ ID NO: 1824 - protein, 225 aa, synthetic construct
QIQLVQSGPELKKPGETVKISCKASGYTFTDYGVIWVKQAPGKALKWMGWINTYTGEPTYADDLKGRFAFSLETSASSASLQINNLKNEDTATYFCARRYGPEDIDYWGQGTTLTVSSASTKGPSVFPLAPSSKSTSGGTAALGCLVKDYFPEPVTVSWNSGALTSGVHTFPAVLQSSGLYSLSSVVTVPSSSLGTQTYICNVNHKPSNTKVDKKVEPKSCDEVD

SEQ ID NO: 1825 - protein, 218 aa, synthetic construct
DIVLTQSPVSLAVSLGQRATISCRASESVDNYGISFMSWFQQKPGQPPKLLIYAASHQGSGVPARFSGSGSGTDFSLNIHPMEEDDSAMYFCLQSKEVPWTFGGGTKLEIKRTVAAPSVFIFPPSDEQLKSGTASVVCLLNNFYPREAKVQWKVDNALQSGNSQESVTEQDSKDSTYSLSSTLTLSKADYEKHKVYACEVTHQGLSSPVTKSFNRGEC

SEQ ID NO: 1826 - protein, 232 aa, synthetic construct
QVQLQQSGPDLVKPGASVKISCKASGYTFTSYWVNWMKQRPGKGLEWIGRIYPGDGDTNYNGKFKGKATLTADKSSSTAYMQLSSLTSEDSAVYFCARAYLLRLRRTGYYAMDYWGQGTSVTVSSASTKGPSVFPLAPSSKSTSGGTAALGCLVKDYFPEPVTVSWNSGALTSGVHTFPAVLQSSGLYSLSSVVTVPSSSLGTQTYICNVNHKPSNTKVDKKVEPKSCDEVD

SEQ ID NO: 1827 - protein, 219 aa, synthetic construct
DVVLTQTPLSLPVNIGDQASISCKSTKSLLNSDEFTYLDWYLQKPGQSPQLLIFLVSNRFSGVPDRFSGSGSGTDFTLKISRVEAEDLGVYYCFQSNYLPYTFGGGTKLEIKRTVAAPSVFIFPPSDEQLKSGTASVVCLLNNFYPREAKVQWKVDNALQSGNSQESVTEQDSKDSTYSLSSTLTLSKADYEKHKVYACEVTHQGLSSPVTKSFNRGEC

SEQ ID NO: 1828 - protein, 224 aa, synthetic construct
QVQLKESGPGLVAPSQSLSITCTVSGFSLSRYSVHWVRQPPGKGLEWLGMIWGFGSTDYNSALKSRLSITKDNSKSQFFLKMNSLQTDDTAMYYCARIHTTAGSYWGQGTLVTVSAASTKGPSVFPLAPSSKSTSGGTAALGCLVKDYFPEPVTVSWNSGALTSGVHTFPAVLQSSGLYSLSSVVTVPSSSLGTQTYICNVNHKPSNTKVDKKVEPKSCDEVDG

SEQ ID NO: 1829 - protein, 214 aa, synthetic construct
DIVMTQSQKFMSTSIGDRVSVTCKASQNVGTNVAWYQQKPGQSPKALVYSTSYRYSGVPDRFTGSGSGTDFTLTISNVQSEDLAEYFCHQYNSYPLTFGAGTKLELKRTVAAPSVFIFPPSDEQLKSGTASVVCLLNNFYPREAKVQWKVDNALQSGNSQESVTEQDSKDSTYSLSSTLTLSKADYEKHKVYACEVTHQGLSSPVTKSFNRGEC

SEQ ID NO: 1830 - protein, 230 aa, synthetic construct
QVQLKQSGTELVRPGASVKLSCKASGYTFTDYYINWVKQRPGQGLEWIARIYPGNGNTYHNEKFKGKATLTAEKSSSTAYMQLSSLTSEDSAVYFCAREGLYYDYDRYFDYWGQGTALTVSSASTKGPSVFPLAPSSKSTSGGTAALGCLVKDYFPEPVTVSWNSGALTSGVHTFPAVLQSSGLYSLSSVVTVPSSSLGTQTYICNVNHKPSNTKVDKKVEPKSCDEVDG

SEQ ID NO: 1831 - protein, 218 aa, synthetic construct
NIVLTQSPASLAVSLGQRATISCRASESVDTYGNSFMHWYQQKPGQPPKLLIYLASNLESGVPARFSGSGSRTDFTLTIDPVEADDAATYYCHQNNEDPPAFGGGTKLEIKRTVAAPSVFIFPPSDEQLKSGTASVVCLLNNFYPREAKVQWKVDNALQSGNSQESVTEQDSKDSTYSLSSTLTLSKADYEKHKVYACEVTHQGLSSPVTKSFNRGEC

SEQ ID NO: 1832 - protein, 394 aa, Pan troglodytes
MIVFIFLAMGLSLENEYTSQTNNCTYLREQCLRDANGCKHAWRVMEDACNDSDPGDPCKMRNSSYCNLSIQYLVESNFQFKECLCTDDFYCTVNKLLGKKCINKSDNVKEDKFKWNLTTRSHHGFKGMWSCLEVAEACVGDVVCNAQLASYLKACSANGNPCDVKQCQAAIRFFYQNIPFNIAQMLAFCDCAQSDIPCQQSKEALHSKTCAVNLVPPPTCLSVIRSCQNDELCRRHYRTFQSKCWQRVTRKCHEDENCISALSKQDLTCSGSDDCKAAYIDILGTVLQVQCTCRTITQSEESLCKIFQHMLHRKSCFNYPTLSNVKGMALYTRKHANKITLTGFHSPFNGEVIYAAMCMTVTCGILLLVMVKLRTSRISSKARDPSPIQIPGEL

SEQ ID NO: 1833 - protein, 395 aa, Ailuropoda melanoleuca
MVVFIFLAVALCLENESTSETIDCTYLREQCLRDANGCKHAWRIMEDSCNVSEPGNPCKMKDSSKCNLSIQSLVESNFQFEDCLCTDNLYCTINKLLGEQCINESGNVKEDNQSKWNLTTLPYQGIKGIQSCLEVAEACVGDVVCNAQLAPYLKACSANGNLCDVKHCQAAIRFFYQNMPFNIAQMLAFCDCAQSDIPCQQSREALHSKPCAVNVVPPPTCLDVIHSCRNDELCRRRYRTFQSKCWQHVTRKCHEDELCISTLSQQDLICSGSDDCKAAYIGTFGTVLQVQCTCRTITQSEESLCKIFQHMLHRRSCFDYLTLSNVKGMALHKRKPAKEITLSGFHSPFNGEVIYAVMCMTVTCGILLLVMLKLRTSRISSQTRDHSPIRIPGGL

SEQ ID NO: 1834 - protein, 395 aa, Canis lupus
MIVFIFLAMVLCLENESTSQTIDCTHLREQCLSDADGCKHAWRIMEYSCNVSVPGNPCKMKDSSNCNLSIQSLVENNFQFEDCLCTDNIYCTINKLLGEQCMNESDNMKEDNQYKWNLTTLPYHGIKGIQSCLEVAEACVGDVVCNTQLAAYLKACSANGNLCDVKHCQAAIRFFYQNMPFNIAQMLAFCDCAPSDIPCQQSKEALHSKPCAVNVVPPPSCLDVIHSCRNDELCRRRYRTFQSKCWQHMIRKCHEDELCISTLSQQDLTCSGSDDCKAAYIGTFGTVLQVQCTCRTTTQNEESLCKIFQHMLHGRSCFDYPTLSNVKGMALHERKHAKEITLSGFHSPFNGEVIYAVMCMTVTCGILLLVMLKLRTSRISSQTRDHSPIQIPGGL

SEQ ID NO: 1835 - protein, 395 aa, Felis catus
SVLIVISAMVLCLENESTSQTIDCTYLREQCLSDTNGCKLAWRKMEDSCNVSDPGNPCKMKDSSNCNLSIQSLVENNFQFEDCLCTGNLHCTINKLLGKKCINESDNMKEDNQSKWNLTTLPYNGIKGIQSCLEVAEACVGDVVCNAQLAPYLKACSANGNLCDVKHCQAAIRFFYQSMPFNIAQMLAFCDCAPSDIPCQQSKEALHSKPCAVNIVPPPTCLNVIHSCRNDELCRRRYRTFQWKCWQQVTRKCHEDEFCISTLSKQDLTCSGSDDCKAAYIGILGTVLQAQCTCRTITQGEESLCKIFQHMLHRRSCFNYPTLSNVKGIALHKRKHAKEITLSGFHSPFNGEVIYAVMCMTVTCGILLLVMLKLRTSRISSQTRDHSPVQILEEL

SEQ ID NO: 1836 - protein, 324 aa, Bos taurus
PLIVVIQAVGLCLNKSASQTTDCTYLRELCLSDADGCKHAWRIMEDACNVSGNTCQMKNSSSCGLSIQSLVESNLQFKDCLCFDDLYCTFNKLLGKKCINESDNIKEDNKYKWNLTTLSYHGGRGVQSCLEVAEVCIGDALCNAQLALYLKACSADGKLCDVKHCQAAIRFFYQNMPFNIAQMLAFCDCAPADEPCQQSREALHSRPCAVNRVPTPTCLDVIHSCQDDELCRRRYRIFQAKCWQHVMRKCHEDETCIGTLSKQDLACSGSDDCKAAYIGTLGTVLQGQCTCRTITQSEESLCKTFQHMLHRKSCFNNKPTQNLK

SEQ ID NO: 1837 - protein, 395 aa, Sus scrofa
SVIAVLQAVGLYLENESTSQTTDCTYLRELCLNDTDGCKQAWRIMEDACNVSDPGNTCQMKDSSSCNQSIQSLAESNFQFKDCLCSDDLYCTVNNLIGKKCTNESDNMKEDGVFKRNLTAPSYHGIRGIQSCLEVAEACVRDTVCNAQLALYLKACSANGNLCDVKHCQAAIRFFYQNMPFNVAQMLAFCDCAPSDIPCQQSKEALHSKPCALNRVPAPTCLDVIRSCQNDELCRRRYRIFQAKCWQHVTAKCHDDETCISTLNKQDFTCSRSDDCKAAYMGTLGTALQGQCTCRTTTQSEESLCKIFQHMLHGKSCFNYPTLSNVKGIALHKRKHAKEISLSGCQSPFNGEVIYAVMCMTVTCGILLLVMFKLRNFRISSQTRDPSPIQIPGEP

SEQ ID NO: 1838 - protein, 220 aa, Cricetulus griseus
ACSANGNLCDVKHCQAAIRFFYQNMPFNTAQMLAFCDCAQSDIPCQQSKETLHSKPCALNVVPPPTCLSVIHTCRNDELCRTRYQTFQSECWFHVMGKCHEDETCIGTLGKQDLICSGSDSCRAAYLGTFGTVLQVPCACRSITQDEEPLCMTFQHMLQSKSCFNYPTPNVKDISSYKGKHSKEITLTGFESPFNGELVYAVLCMVVTCGILFLVMLKLR

SEQ ID NO: 1839 - protein, 319 aa, Ornithorhynchus anatinus
MKHYFLFVVLMLGFKCESASLTTGCLHLRKQCVSAMDGCESAWAVIEDVCNVSGHNCTMKESLNCNLSIQLLADRYPAFKDCLCAEDISCSATNFLGRKCIIKTENEHKDKNIKSLWNSTSLLQHGFKGTRSCLEVTVACVGDTVCNKQLARFLKDCSTHGSLCNMNQCQAAIRFFYQNIPFNIAQMLAFCDCAQSDIPCQQSKEALHSKPCAVNVVPTPSCLNVIRSCRDDELCRQRFETFQSKCWQDMDKCSDDETCIVTLNKENITCSRNEECREAYIGTLGTYLHVQCTCSTLSLTEEYLCKIFHHILHSRSCFS

SEQ ID NO: 1840 - protein, 168 aa, Cricetulus griseus
MDVLLNHSFTSFIEESTLPSDLVPRSNVTQGFLREDTFLTAERKDDCVAAAEACQESVHCSLLHENFKKACGKGTAQCHTLSGQQFCVALRESLRETVLWDCQCGFPLEGDCIRIWKGLFEDICIEDTQINQIATFSQDNEDRLKEDIASDNLKKDNKFKWDLTTLHH

SEQ ID NO: 1841 - protein, 308 aa, Macaca mulatta
MPGQELKTLNGSQMLLVLLVLLWPPHGGAMSLAEASRASFPGPSDLHSEDSRFRELRKRYEDLLTRLRANQSWEDSNTDLIQAPEVRILTPEVRLGSGGHLHLRISRAVLPEGLPEASRIHRALFRLSPTASRSWDVTRPLRRQLRLARPQAPALHLRLSPPPSQSDQLLVKSSSSRPQLELHLRLRAARGRRRARARNGDRCPLGPGRCCRLHTVHASLEDLGWADWVLSPREVQVTMCIGACPSQFREANMHAQIKMNLHRLKPDTVPAPCCVPASYNPMVLIQKTDTGVSLQTYDDLLAKDCHCV

SEQ ID NO: 1842 - protein, 308 aa, Hylobates sp.
MPRQEPRMLNGSQMLLVLLVLSWPPHGGALSLAEASPASFPGPSELHSKDSRFRELRKRYEDLLTRLRVNQSWEDLNTDLVPAPAVRILTPEVRLGSGGHLHLRISRAALPEGLPEASRLHRALFRLSPTASRSWDVTRPLRRQLSLARPQAPALHLRLSPPRSRSDQLLAESSSARPQLELHLRPQAARGRRRARARNGDHCPLGPGRCCRLHTVRASLEDLGWADWVLSPREVQVTMCIGACPSQFRAANMHAQIKTSLHRLKPDTVPAPCCVPASYNPMVLIQKTDTGVSLQTYDDLLAKDCHCI

SEQ ID NO: 1843 - protein, 308 aa, Pan troglodytes
MPRQELRTLNGSQMLLVLLVLSWPPHGGALSLAEASRASFSGPSELHSEDARFRELRKRYEDLLTRLRANQSWEDSNTDLVPAPAVRILTPEVRLGSGGHLHLRISRAALPEGLPEASRLHRALFRLSPTAARSWDVTRPLRRQLSLARPQAPALHLRLSPPPSQSDQLLAESSSARPQLELHLRSRAARGLRRARARNGDHCPLGPGRCCRLHTVRASLEDLGWSDWVLSPREVQVTMCIGACPSQFRAANMHAQIKTSLHRLKPDTVPAPCCVPASYNPMVLIQKTDTGVSLQTYDDLLAKDCHCI

SEQ ID NO: 1844 - protein, 308 aa, Pongo sp.
MPRQELRTLNGFQMLLVLLVLSWPPHGGALSLAEASRASFPGPSDLHSEDSRFRELRKRYEDLLTRLRANQSWEDSNTDLVPAPAVRILTPEVRLGSGGHLHLRISRAALPEGLPEASRLHRALFRLSPTASRSWDVTRLLRRQLSLARPQAPALHLRLSPPPSQSDQLLAESSSARPQLELHLRPRAARGRRRARARNGDHCPLGPGRCCRLHTVRASLEDLGWADWVLSPREVQVTMCIGACPSQFRAANMHAQIKTSLHRLKPDTVPAPCCVPASYNPMVLIQKTDTGVSLQTYDDLLAKDCHCI

SEQ ID NO: 1845 - protein, 308 aa, Bos taurus
MPGQRPAAPHRSRMLLMLLMFSWLRSGGALSLTQEHLQTFQGPSNVHSSPDISRFRELRKRYEDLLTRLRANQTWEDSNPDLIPPPQVRIVTPKLRLGPGGHLHLRIPRVNLTEGLPAASRLHRALLRLSPKAWSSWDVTRPLRRQLRLGGSRGPSIRLRLLARPDQLQEALPSAPPQLELHWRPSATRGRRHAHAHTRDGCPLGEGRCCHLQSLRASLEDLGWADWVLAPRELDVRMCIGACPSHFRSANTHAQMQARLHGLNPDAAPAPCCVPASYEPVVLMHQDSDGRVSLTPFDDLVAKDCHCV

SEQ ID NO: 1846 - protein, 308 aa, Sus scrofa
MPGQLPSPPRRSPTLLMLLMLSWLPSGGALSLAQEHLPALPGPSDVHSSSDVSRFRELRKRYEDLLTRLRANQTWEDSNPNLIPAPQVRIVTPKFRLGPGGHLHLRIPRVNLTEGLPAASRLHRALLRLSPTARSSWDVTRPLRRQLSVGGSRGSAIHLRLLQRPDQLLEALPAGQPQLELHWRPSSTRGRRNTHAHTRDGCPLGTGRCCRLQSLRASLEDLGWADWVLAPRELDVRMCVGACPSHFRSANTHAQMQARLHGLNPDAAPAPCCVPASYEPVVLMHQDSDGRVSLTPFDDLVAKDCHCV

SEQ ID NO: 1847 - protein, 307 aa, Canis lupus
MPGQGPAPAHCSPMLVILVMLSWLPSGGALSLAQEHLPAFPGPSDPHSSTDVSRIQELRKRYEHLQTKLRLNQGWADSNPDLVPATRVRILTPKLRLGPRGHLHLRIARADLTAGLPAASRLHRALLRLSPTEPSSWDVTRPLQRQLSRVGSRTPTLRLRLLPRWDRSRALPSARPQLELHWRPRAARGRRNAHAHARDGCPLGEGRCCRLQSLRASLQDLGWANWVVAPRELDVRMCVGACPSQFRSANTHAQMQARLHGLNPDAAPAPCCVPASYEPVVLMHQDSDGRVSLTPFDDLVAKDCHCV

SEQ ID NO: 1848 - protein, 308 aa, Ailuropoda melanoleuca
MPGQGLTPPPGSPMLLMLLMFSWLPSGGALSLAQEHLPAFPGPSDTHSSTDVSRAQEFRKRYAHLQTRLWLNQSRADSNSDLIPAAQVRILTPKLRLGSGGHLHLRIARADLTEGLPAASRLHRALLRLSPTEPSSWDVTRPLQRQLSLGGSRAPVLRLRLLPQWDPLGATLPSARPQLELHWRPRAARGRRNAHAHGGDGCPLGEGRCCRLQSLRASLEDLGWADWVVAPRELDVRMCVGACPSQFRSANTHAQMQARLHGLNPEAAPAPCCVPASYEPVVLMHQDSDGRVSLTPFDDLVAKDCHCV

SEQ ID NO: 1849 - protein, 298 aa, Mustela putorius
HSSPMLPVLLMFSWLPSGGALSLAQERLPAFPGPSDAHSSMDISRAQEFRKHYEHLQTRLRLNQSWGDSNSDLNLTAPVRILTPKLRLGPGGHLHLRIALADLTEGLPATSRLHQALLRLSPMEPSSWDVTRPLQRQLSLGGSRASALHLRLLPRLNRLRATLPSARPQLELHWRPSAARGRRDAHAHAGDGCPLGEGRCCRLQSLRASLEDLGWANWVVAPRELDVRMCIGACPSQFRSANTHAQMQARLHGLNPDAAPAPCCVPASYEPVVLLHQDSDGRVSLTPFDDLVAKDCHC

SEQ ID NO: 1850 - protein, 303 aa, Mus musculus
MAPPALQAQPPGGSQLRFLLFLLLLLLLLSWPSQGDALAMPEQRPSGPESQLNADELRGRFQDLLSRLHANQSREDSNSEPSPDPAVRILSPEVRLGSHGQLLLRVNRASLSQGLPEAYRVHRALLLLTPTARPWDITRPLKRALSLRGPRAPALRLRLTPPPDLAMLPSGGTQLELRLRVAAGRGRRSAHAHPRDSCPLGPGRCCHLETVQATLEDLGWSDWVLSPRQLQLSMCVGECPHLYRSANTHAQIKARLHGLQPDKVPAPCCVPSSYTPVVLMHRTDSGVSLQTYDDLVARGCHCA

SEQ ID NO: 1851 - protein, 301 aa, Cavia porcellus
MPALGFTLLLLAAVSRPPPGGASGPAEKLPAEPDPDLDPDRDPDPAAHPARELRRRFEDLLARLRANRSADALPAERSPAPVVHTLTPDVRRGHDGSLHLRIPRASLPPGVPRASRVQHALLRLSPETREPWDVTRPLQRQLRLLDPRAPALLLHLWPPSDRWRELSSAPPRLELHLRTRSARGRRSTRMRTRDDCPLGPGRCCRLHTVRASLQDLGWTDWVLSPRELHVGICMGECPSLYRSANTHAQVKARLHGLKPDSVPAPCCVPSSYDLVVLMHKTDGGIALHTYDDLIAKGCHCA

SEQ ID NO: 1852 - protein, 113 aa, synthetic construct; identical to SEQ ID NO: 2

SEQ ID NO: 1853 - protein, 111 aa, synthetic construct; identical to SEQ ID NO: 4

SEQ ID NO: 1854 - protein, 107 aa, synthetic construct; identical to SEQ ID NO: 6

SEQ ID NO: 1855 - protein, 106 aa, synthetic construct; identical to SEQ ID NO: 26

SEQ ID NO: 1856 - protein, 103 aa, synthetic construct; identical to SEQ ID NO: 30

SEQ ID NO: 1857 - protein, 107 aa, synthetic construct; identical to SEQ ID NO: 40

SEQ ID NO: 1858 - protein, 107 aa, synthetic construct; identical to SEQ ID NO: 18

SEQ ID NO: 1859 - protein, 107 aa, synthetic construct; identical to SEQ ID NO: 20

SEQ ID NO: 1860 - protein, 106 aa, synthetic construct; identical to SEQ ID NO: 483

SEQ ID NO: 1861 - protein, 106 aa, synthetic construct; identical to SEQ ID NO: 487

SEQ ID NO: 1862 - protein, 107 aa, synthetic construct; identical to SEQ ID NO: 12

SEQ ID NO: 1863 - protein, 106 aa, synthetic construct; identical to SEQ ID NO: 34

SEQ ID NO: 1864 - protein, 107 aa, synthetic construct; identical to SEQ ID NO: 32

SEQ ID NO: 1865 - protein, 108 aa, synthetic construct; identical to SEQ ID NO: 36

SEQ ID NO: 1866 - protein, 112 aa, synthetic construct; identical to SEQ ID NO: 22

SEQ ID NO: 1867 - protein, 112 aa, synthetic construct; identical to SEQ ID NO: 24

SEQ ID NO: 1868 - protein, 112 aa, synthetic construct; identical to SEQ ID NO: 10

SEQ ID NO: 1869 - protein, 112 aa, synthetic construct; identical to SEQ ID NO: 14

SEQ ID NO: 1870 - protein, 112 aa, synthetic construct; identical to SEQ ID NO: 481

SEQ ID NO: 1871 - protein, 112 aa, synthetic construct; identical to SEQ ID NO: 485

SEQ ID NO: 1872 - protein, 112 aa, synthetic construct; identical to SEQ ID NO: 16

SEQ ID NO: 1873 - protein, 112 aa, synthetic construct; identical to SEQ ID NO: 28

SEQ ID NO: 1874 - protein, 111 aa, synthetic construct; identical to SEQ ID NO: 8

SEQ ID NO: 1875 - protein, 111 aa, synthetic construct; identical to SEQ ID NO: 38

SEQ ID NO: 1876 - protein, 118 aa, synthetic construct; identical to SEQ ID NO: 480

SEQ ID NO: 1877 - protein, 117 aa, synthetic construct; identical to SEQ ID NO: 482

SEQ ID NO: 1878 - protein, 117 aa, synthetic construct; identical to SEQ ID NO: 484

SEQ ID NO: 1879 - protein, 113 aa, synthetic construct; identical to SEQ ID NO: 486

SEQ ID NO: 1880 - protein, 112 aa, synthetic construct; identical to SEQ ID NO: 481

SEQ ID NO: 1881 - protein, 106 aa, synthetic construct; identical to SEQ ID NO: 483

SEQ ID NO: 1882 - protein, 112 aa, synthetic construct; identical to SEQ ID NO: 485

SEQ ID NO: 1883 - protein, 106 aa, synthetic construct; identical to SEQ ID NO: 487

SEQ ID NO: 1884 - protein, 121 aa, synthetic construct
QMQLKQSGPGLVQPSQSLSITCTVSGFSLNDYGVHWIRQSPGKGLEWLGVIWSGGRTDYNAAFISRLSISKDNSKSQVFFKMSSLQPNDTAIYYCARWALYFLYGGSMDYWGQGTSVTVSS

SEQ ID NO: 1885 - protein, 119 aa, synthetic construct; identical to SEQ ID NO: 33

SEQ ID NO: 1886 - protein, 120 aa, synthetic construct; identical to SEQ ID NO: 21

SEQ ID NO: 1887 - protein, 118 aa, synthetic construct; identical to SEQ ID NO: 9

SEQ ID NO: 1888 - protein, 122 aa, synthetic construct; identical to SEQ ID NO: 31

SEQ ID NO: 1889 - protein, 116 aa, synthetic construct; identical to SEQ ID NO: 11

SEQ ID NO: 1890 - protein, 114 aa, synthetic construct; identical to SEQ ID NO: 5

SEQ ID NO: 1891 - protein, 118 aa, synthetic construct; identical to SEQ ID NO: 13

SEQ ID NO: 1892 - protein, 125 aa, synthetic construct; identical to SEQ ID NO: 15

SEQ ID NO: 1893 - protein, 125 aa, synthetic construct; identical to SEQ ID NO: 27

SEQ ID NO: 1894 - protein, 114 aa, synthetic construct; identical to SEQ ID NO: 19

SEQ ID NO: 1895 - protein, 113 aa, synthetic construct; identical to SEQ ID NO: 2

SEQ ID NO: 1896 - protein, 106 aa, synthetic construct; identical to SEQ ID NO: 34

SEQ ID NO: 1897 - protein, 112 aa, synthetic construct; identical to SEQ ID NO: 22

SEQ ID NO: 1898 - protein, 112 aa, synthetic construct; identical to SEQ ID NO: 10

SEQ ID NO: 1899 - protein, 107 aa, synthetic construct; identical to SEQ ID NO: 32

SEQ ID NO: 1900 - protein, 107 aa, synthetic construct; identical to SEQ ID NO: 12

SEQ ID NO: 1901 - protein, 107 aa, synthetic construct; identical to SEQ ID NO: 6

SEQ ID NO: 1902 - protein, 112 aa, synthetic construct; identical to SEQ ID NO: 14

SEQ ID NO: 1903 - protein, 112 aa, synthetic construct; identical to SEQ ID NO: 16

SEQ ID NO: 1904 - protein, 112 aa, synthetic construct; identical to SEQ ID NO: 28

SEQ ID NO: 1905 - protein, 107 aa, synthetic construct; identical to SEQ ID NO: 20

SEQ ID NO: 1906 - protein, 119 aa, synthetic construct; identical to SEQ ID NO: 25

SEQ ID NO: 1907 - protein, 119 aa, synthetic construct; identical to SEQ ID NO: 39

SEQ ID NO: 1908 - protein, 118 aa, synthetic construct; identical to SEQ ID NO: 3

SEQ ID NO: 1909 - protein, 122 aa, synthetic construct; identical to SEQ ID NO: 7

SEQ ID NO: 1910 - protein, 120 aa, synthetic construct; identical to SEQ ID NO: 37

SEQ ID NO: 1911 - protein, 120 aa, synthetic construct; identical to SEQ ID NO: 23

SEQ ID NO: 1912 - protein, 106 aa, synthetic construct; identical to SEQ ID NO: 26

SEQ ID NO: 1913 - protein, 107 aa, synthetic construct; identical to SEQ ID NO: 40

SEQ ID NO: 1914 - protein, 111 aa, synthetic construct; identical to SEQ ID NO: 4

SEQ ID NO: 1915 - protein, 111 aa, synthetic construct; identical to SEQ ID NO: 8

SEQ ID NO: 1916 - protein, 111 aa, synthetic construct; identical to SEQ ID NO: 38

SEQ ID NO: 1917 - protein, 112 aa, synthetic construct; identical to SEQ ID NO: 24

SEQ ID NO: 1918 - protein, 121 aa, synthetic construct; identical to SEQ ID NO: 1884

SEQ ID NO: 1919 - protein, 121 aa, synthetic construct
QVQLQESGPGLVKPSETLSLTCTVSGFSLNDYGVHWIRQPPGKGLEWIGVIWSGGRTDYNAAFISRVTISVDTSKNQFSLKLSSVTAADTAVYYCARWALYFLYGGSMDYWGQGTLVTVSS

SEQ ID NO: 1920 - protein, 121 aa, synthetic construct
QVQLQESGPGLVKPSETLSLTCTVSGFSLNDYGVHWIRQPPGKGLEWIGVIWSGGRTDYNAAFISRVTISKDTSKNQFSLKLSSVTAADTAVYYCARWALYFLYGGSMDYWGQGTLVTVSS

SEQ ID NO: 1921 - protein, 121 aa, synthetic construct
QMQLQESGPGLVKPSETLSLTCTVSGFSLNDYGVHWIRQPPGKGLEWIGVIWSGGRTDYNAAFISRLTISVDTSKNQVSLKLSSVQAADTAVYYCARWALYFLYGGSMDYWGQGTLVTVSS

SEQ ID NO: 1922 - protein, 121 aa, synthetic construct
QMQLQESGPGLVKPSETLSLTCTVSGFSLNDYGVHWIRQPPGKGLEWIGVIWSGGRTDYNAAFISRVTISKDNSKSQFSLKLSSVTAQDTAVYYCARWALYFLYGGSMDYWGQGTLVTVSS

SEQ ID NO: 1923 - protein, 121 aa, synthetic construct
QMQLQESGPGLVKPSETLSLTCTVSGFSLNDYGVHWIRQPPGKGLEWIGVIWSGGRTDYNAAFISRLTISKDTSKNQFSLKMSSVTAADTAVYYCARWALYFLYGGSMDYWGQGTLVTVSS

SEQ ID NO: 1924 - protein, 121 aa, synthetic construct
QMQLQESGPGLVKPSETLSLTCTVSGFSLNDYGVHWIRQPPGKGLEWLGVIWSGGRTDYNAAFISRLTISKDTSKNQVSFKMSSLTAADTAVYYCARWALYFLYGGSMDYWGQGTLVTVSS

SEQ ID NO: 1925 - protein, 121 aa, synthetic construct
QVQLQESGPGLVKPSETLSLTCTVSGFSLNDYGVHWIRQPPGKGLEWIGVIWSGGRTDYNAAFISRVTISRDTSKNQFSLKLSSVTAADTAVYYCARWALYFLYGGSMDYWGQGTLVTVSS

SEQ ID NO: 1926 - protein, 121 aa, synthetic construct
QMQLQESGPGLVKPSETLSLTCTVSGFSLNDYGVHWIRQPPGKGLEWIGVIWSGGRTDYNAAFISRVTISRDTSKSQFSLKLSSVTAADTAVYYCARWALYFLYGGSMDYWGQGTLVTVSS

SEQ ID NO: 1927 - protein, 121 aa, synthetic construct
QMQLQESGPGLVKPSETLSLTCTVSGFSLNDYGVHWIRQPPGKGLEWIGVIWSGGRTDYNAAFISRLTISRDTSKSQVSFKLSSVTAADTAVYYCARWALYFLYGGSMDYWGQGTLVTVSS

SEQ ID NO: 1928 - protein, 113 aa, synthetic construct; identical to SEQ ID NO: 2

SEQ ID NO: 1929 - protein, 113 aa, synthetic construct
DVVMTQSPLSLPVTLGQPASISCRSSQSLVHSSGITYLHWFQQRPGQSPRRLIYKLSNRFSGVPDRFSGSGSGTDFTLKISRVEAEDVGVYYCSQSTHVPPWTFGGGTKVEIK

SEQ ID NO: 1930 - protein, 113 aa, synthetic construct
DVVLTQSPLSLPVTLGQPASISCRSSQSLVHSSGITYLHWYQQRPGQSPRRLIYKLSNRFSGVPDRFSGSGSGTDFTLKISRVEAEDVGVYYCSQSTHVPPWTFGGGTKVEIK

SEQ ID NO: 1931 - protein, 113 aa, synthetic construct
DVVLTQSPLSLPVTLGQPASISCRSSQSLVHSSGITYLHWYQQRPGQSPKLLIYKLSNRFSGVPDRFSGSGSGTDFTLKISRVEAEDVGVYYCSQSTHVPPWTFGGGTKVEIK

SEQ ID NO: 1932 - protein, 113 aa, synthetic construct
DVVLTQSPLSLPVTLGDPASISCRSSQSLVHSSGITYLHWYQQKPGQSPKLLIYKLSNRFSGVPDRFSGSGSGTDFTLKISRVEAEDVGVYYCSQSTHVPPWTFGGGTKVEIK

SEQ ID NO: 1933 - protein, 113 aa, synthetic construct; identical to SEQ ID NO: 2

SEQ ID NO: 1934 - protein, 113 aa, synthetic construct
DIVMTQTPLSLPVSPGDQASISCRSSQSLVHSSGITYLHWYLQKPGQSPKLLIYKLSNRFSGVPDRFSGSGSGTDFTLKISRVEAEDLGVYFCSQSTHVPPWTFGGGTKLEIK

SEQ ID NO: 1935 - protein, 125 aa, synthetic construct; identical to SEQ ID NO: 15

SEQ ID NO: 1936 - protein, 125 aa, synthetic construct
EVQLVQSGAEVKKPGESLKISCKGSGYTFTSYWVNWVRQMPGKGLEWMGRIYPGDGDTNYNGKFKGQVTISADKSISTAYLQWSSLKASDTAMYYCARAYLLRLRRTGYYAMDYWGQGTTVTVSS

SEQ ID NO: 1937 - protein, 125 aa, synthetic construct
EVQLVQSGAEVKKPGESLKISCKGSGYTFTSYWVNWVRQMPGKGLEWIGRIYPGDGDTNYNGKFKGQATISADKSISTAYLQWSSLKASDTAMYYCARAYLLRLRRTGYYAMDYWGQGTTVTVSS

SEQ ID NO: 1938 - protein, 125 aa, synthetic construct
EVQLVQSGAEVKKPGESLKISCKGSGYTFTSYWVNWVRQMPGKGLEWIGRIYPGDGDTNYNGKFKGQATLSADKSISTAYLQWSSLKASDTAMYYCARAYLLRLRRTGYYAMDYWGQGTTVTVSS

SEQ ID NO: 1939 - protein, 125 aa, synthetic construct
QVQLVQSGAEVKKPGSSVKVSCKASGYTFTSYWVNWVRQAPGQGLEWMGRIYPGDGDTNYNGKFKGRVTITADESTSTAYMELSSLRSEDTAVYYCARAYLLRLRRTGYYAMDYWGQGTTVTVSS

SEQ ID NO: 1940 - protein, 125 aa, synthetic construct
QVQLVQSGAEVKKPGSSVKVSCKASGYTFTSYWVNWVRQAPGQGLEWIGRIYPGDGDTNYNGKFKGRATITADESTSTAYMELSSLRSEDTAVYYCARAYLLRLRRTGYYAMDYWGQGTTVTVSS

SEQ ID NO: 1941 - protein, 125 aa, synthetic construct
QVQLVQSGAEVKKPGSSVKVSCKASGYTFTSYWVNWVRQAPGQGLEWIGRIYPGDGDTNYNGKFKGRATLTADKSTSTAYMELSSLRSEDTAVYYCARAYLLRLRRTGYYAMDYWGQGTTVTVSS

SEQ ID NO: 1942 - protein, 112 aa, synthetic construct; identical to SEQ ID NO: 16

SEQ ID NO: 1943 - protein, 112 aa, synthetic construct
DVVMTQSPLSLPVTLGQPASISCKSTKSLLNSDEFTYLDWFQQRPGQSPRRLIYLVSNRFSGVPDRFSGSGSGTDFTLKISRVEAEDVGVYYCFQSNYLPYTFGGGTKVEIK

SEQ ID NO: 1944 - protein, 112 aa, synthetic construct
DVVLTQSPLSLPVTLGQPASISCKSTKSLLNSDEFTYLDWFQQRPGQSPRLLIYLVSNRFSGVPDRFSGSGSGTDFTLKISRVEAEDVGVYYCFQSNYLPYTFGGGTKVEIK

SEQ ID NO: 1945 - protein, 112 aa, synthetic construct
DVVLTQSPLSLPVTLGQPASISCKSTKSLLNSDEFTYLDWYQQRPGQSPRLLIFLVSNRFSGVPDRFSGSGSGTDFTLKISRVEAEDVGVYYCFQSNYLPYTFGGGTKVEIK

SEQ ID NO: 1946 - protein, 112 aa, synthetic construct
EIVLTQSPGTLSLSPGERATLSCKSTKSLLNSDEFTYLDWYQQKPGQAPRLLIYLVSNRFSGIPDRFSGSGSGTDFTLTISRLEPEDFAVYYCFQSNYLPYTFGGGTKVEIK

SEQ ID NO: 1947 - protein, 112 aa, synthetic construct
EVVLTQSPGTLSLSPGERATLSCKSTKSLLNSDEFTYLDWYQQKPGQAPRLLIFLVSNRFSGIPDRFSGSGSGTDFTLTISRLEPEDFAVYYCFQSNYLPYTFGGGTKVEIK

SEQ ID NO: 1948 - protein, 118 aa, synthetic construct; identical to SEQ ID NO: 13

SEQ ID NO: 1949 - protein, 118 aa, synthetic construct
QVQLVQSGAEVKKPGSSVKVSCKASGYTFTDYWIHWVRQAPGQGLEWMGYINPNSNYAEYNQKFKVRVTITADESTSTAYMELSSLRSEDTAVYYCARFDWNWYFHVWGQGTTVTVSS

SEQ ID NO: 1950 - protein, 118 aa, synthetic construct
QVQLVQSGAEVKKPGSSVKVSCKASGYTFTDYWIHWVRQAPGQGLEWIGYINPNSNYAEYNQKFKVRVTITADESTSTAYMELSRLRSEDTAVYYCARFDWNWYFHVWGQGTTVTVSS

SEQ ID NO: 1951 - protein, 118 aa, synthetic construct
QVQLVQSGAEVKKPGSSVKVSCKASGYTFTDYWIHWVRQAPGQGLEWIGYINPNSNYAEYNQKFKVRATLTADESTSTAYLELSRLRSEDTAVYYCARFDWNWYFHVWGQGTTVTVSS

SEQ ID NO: 1952 - protein, 118 aa, synthetic construct
QVQLVQSGAEVKKPGSSVKVSCKASGYTFTDYWIHWVKQAPGQGLEWIGYINPNSNYAEYNQKFKVRATLTADESSSTAYLELSRLRSEDTAVYYCARFDWNWYFHVWGQGTTVTVSS

SEQ ID NO: 1953 - protein, 112 aa, synthetic construct; identical to SEQ ID NO: 14

SEQ ID NO: 1954 - protein, 112 aa, synthetic construct
DVVMTQSPLSLPVTLGQPASISCKSSQSLSDSDGKTYLNWFQQRPGQSPRRLIYLVSRLGSGVPDRFSGSGSGTDFTLKISRVEAEDVGVYYCWQGTHFPQTFGGGTKVEIK

SEQ ID NO: 1955 - protein, 112 aa, synthetic construct
DVVLTQSPLSLPVTLGQPASISCKSSQSLSDSDGKTYLNWLQQRPGQSPRRLIYLVSRLGSGVPDRFSGSGSGTDFTLKISRVEAEDVGVYYCWQGTHFPQTFGGGTKVEIK

SEQ ID NO: 1956 - protein, 112 aa, synthetic construct
DVALTQSPLSLPVTLGQPASISCKSSQSLSDSDGKTYLNWLQQRPGQSPKRLIYLVSRLGSGVPDRFSGSGSGADFTLKISRVEAEDVGVYYCWQGTHFPQTFGGGTKVEIK

SEQ ID NO: 1957 - protein, 122 aa, synthetic construct; identical to SEQ ID NO: 7

SEQ ID NO: 1958 - protein, 122 aa, synthetic construct
QVQLVQSGAEVKKPGSSVKVSCKASGYTFTDYYINWVRQAPGQGLEWMGRIYPGNGNTYHNEKFKGRVTITADESTSTAYMELSSLRSEDTAVYYCAREGLYYDYDRYFDYWGQGTLVTVSS

SEQ ID NO: 1959 - protein, 122 aa, synthetic construct
QVQLVQSGAEVKKPGSSVKVSCKASGYTFTDYYINWVRQAPGQGLEWIGRIYPGNGNTYHNEKFKGRVTITADESTSTAYMELSSLRSEDTAVYYCAREGLYYDYDRYFDYWGQGTLVTVSS

SEQ ID NO: 1960 - protein, 122 aa, synthetic construct
QVQLVQSGAEVKKPGSSVKVSCKASGYTFTDYYINWVRQAPGQGLEWIGRIYPGNGNTYHNEKFKGRVTITADKSTSTAYMELSSLRSEDTAVYYCAREGLYYDYDRYFDYWGQGTLVTVSS

SEQ ID NO: 1961 - protein, 122 aa, synthetic construct
QVQLVQSGAEVKKPGSSVKVSCKASGYTFTDYYINWVRQAPGQGLEWIGRIYPGNGNTYHNEKFKGRATLTADKSTSTAYMELSSLRSEDTAVYYCAREGLYYDYDRYFDYWGQGTLVTVSS

SEQ ID NO: 1962 - protein, 122 aa, synthetic construct
QVQLVQSGAEVKKPGSSVKVSCKASGYTFTDYYINWVRQAPGQGLEWMGRIYPGNGNTYHNEKFKGRATLTADESTSTAYMELSSLRSEDTAVYYCAREGLYYDYDRYFDYWGQGTLVTVSS

SEQ ID NO: 1963 - protein, 122 aa, synthetic construct
QVQLVQSGAEVVKPGSSVKVSCKASGYTFTDYYINWVKQAPGQGLEWIGRIYPGNGNTYHNEKFKGRATLTADESTSTAYMELSSLRSEDTAVYYCAREGLYYDYDRYFDYWGQGTLVTVSS

SEQ ID NO: 1964 - protein, 122 aa, synthetic construct
QVQLVQSGAEVKKPGSSVKVSCKASGYTFTDYYINWVRQAPGQGLEWIARIYPGNGNTYHNEKFKGRATLTADKSTSTAYMELSSLRSEDTAVYYCAREGLYYDYDRYFDYWGQGTLVTVSS

SEQ ID NO: 1965 - protein, 122 aa, synthetic construct
QVQLVQSGAEVKKPGASVKVSCKASGYTFTDYYINWVRQAPGQRLEWIARIYPGNGNTYHNEKFKGRATLTRDKSASTAYMELSSLRSEDTAVYYCAREGLYYDYDRYFDYWGQGTLVTVSS

SEQ ID NO: 1966 - protein, 111 aa, synthetic construct; identical to SEQ ID NO: 8

SEQ ID NO: 1967 - protein, 111 aa, synthetic construct
DIVMTQSPDSLAVSLGERATINCRASESVDTYGNSFMHWYQQKPGQPPKLLIYLASNLESGVPDRFSGSGSGTDFTLTISSLQAEDVAVYYCHQNNEDPPAFGGGTKVEIK

SEQ ID NO: 1968 - protein, 111 aa, synthetic construct
DIVLTQSPDSLAVSLGERATINCRASESVDTYGNSFMHWYQQKPGQPPKLLIYLASNLESGVPDRFSGSGSGTDFTLTISSVQAEDVAVYYCHQNNEDPPAFGGGTKVEIK

SEQ ID NO: 1969 - protein, 111 aa, synthetic construct
DIVLTQSPDSLAVSLGERATINCRASESVDTYGNSFMHWYQQKPGQPPKLLIYLASNLESGVPDRFSGSGSRTDFTLTISSLQAEDVAVYYCHQNNEDPPAFGGGTKVEIK

SEQ ID NO: 1970 - protein, 111 aa, synthetic construct
DIQMTQSPSSLSASVGDRVTITCRASESVDTYGNSFMHWYQQKPGKAPKLLIYLASNLESGVPSRFSGSGSGTDFTLTISSLQPEDFATYYCHQNNEDPPAFGGGTKVEIK

SEQ ID NO: 1971 - protein, 111 aa, synthetic construct
DIQLTQSPSSLSASVGDRVTITCRASESVDTYGNSFMHWYQQKPGKAPKLLIYLASNLESGVPSRFSGSGSGTDFTLTISSVQPEDFATYYCHQNNEDPPAFGGGTKVEIK

SEQ ID NO: 1972 - protein, 111 aa, synthetic construct
EIVLTQSPATLSLSPGERATLSCRASESVDTYGNSFMHWYQQKPGQAPRLLIYLASNLESGIPARFSGSGSGTDFTLTISSLEPEDFAVYYCHQNNEDPPAFGGGTKVEIK

SEQ ID NO: 1973 - protein, 111 aa, synthetic construct
EIVLTQSPATLSVSPGERATLSCRASESVDTYGNSFMHWYQQKPGQAPRLLIYLASNLESGVPARFSGSGSGTDFTLTISSVEPEDFAVYYCHQNNEDPPAFGGGTKVEIK

SEQ ID NO: 1974 - protein, 111 aa, synthetic construct
DVVMTQSPLSLPVTLGQPASISCRASESVDTYGNSFMHWFQQRPGQSPRRLIYLASNLESGVPDRFSGSGSGTDFTLKISRVEAEDVGVYYCHQNNEDPPAFGGGTKVEIK

SEQ ID NO: 1975 - protein, 111 aa, synthetic construct
DVVLTQSPLSLPVTLGQPASISCRASESVDTYGNSFMHWFQQRPGQSPRLLIYLASNLESGVPDRFSGSGSGTDFTLKISRVEAEDVGVYYCHQNNEDPPAFGGGTKVEIK

SEQ ID NO: 1976 - protein, 111 aa, synthetic construct
DIVLTQSPLSLPVTLGQPASISCRASESVDTYGNSFMHWYQQRPGQSPRLLIYLASNLESGVPDRFSGSGSRTDFTLKISRVEAEDVGVYYCHQNNEDPPAFGGGTKVEIK

SEQ ID NO: 1977 - protein, 118 aa, synthetic construct; identical to SEQ ID NO: 3

SEQ ID NO: 1978 - protein, 118 aa, synthetic construct
QVQLVQSGAEVKKPGSSVKVSCKASGYTFTDYGVIWVRQAPGQGLEWMGWINTYTGEPTYADDLKGRVTITADESTSTAYMELSSLRSEDTAVYYCARRYGPEDIDYWGQGTTVTVSS

SEQ ID NO: 1979 - protein, 118 aa, synthetic construct
QIQLVQSGAEVKKPGSSVKVSCKASGYTFTDYGVIWVRQAPGQGLKWMGWINTYTGEPTYADDLKGRFTITLDESTSTAYMELSSLRSEDTAVYYCARRYGPEDIDYWGQGTTVTVSS

SEQ ID NO: 1980 - protein, 118 aa, synthetic construct
QIQLVQSGAEVKKPGSSVKVSCKASGYTFTDYGVIWVRQAPGQGLKWMGWINTYTGEPTYADDLKGRFTFTLDESTSTAYMELSSLRSEDTAVYYCARRYGPEDIDYWGQGTTVTVSS

SEQ ID NO: 1981 - protein, 118 aa, synthetic construct
QIQLVQSGAEVKKPGSSVKVSCKASGYTFTDYGVIWVRQAPGKALKWMGWINTYTGEPTYADDLKGRVTFTADESTSTAYMELSNLRSEDTAVYFCARRYGPEDIDYWGQGTTVTVSS

SEQ ID NO: 1982 - protein, 118 aa, synthetic construct
QVQLVQSGAEVKKPGSSVKVSCKASGYTFTDYGVIWVRQAPGQGLEWMGWINTYTGEPTYADDLKGRVTFTADESTSTAYMELSSLRSEDTAVYYCARRYGPEDIDYWGQGTTVTVSS

SEQ ID NO: 1983 - protein, 118 aa, synthetic construct
QVQLVQSGAEVKKPGSSVKVSCKASGYTFTDYGVIWVRQAPGQGLKWMGWINTYTGEPTYADDLKGRVTITADESTSTAYMELSSLRSEDTAVYYCARRYGPEDIDYWGQGTTVTVSS

SEQ ID NO: 1984 - protein, 118 aa, synthetic construct
QVQLVQSGAEVKKPGSSVKVSCKASGYTFTDYGVIWVRQAPGQGLKWMGWINTYTGEPTYADDLKGRVTFTADESTSTAYMELSSLRSEDTAVYYCARRYGPEDIDYWGQGTTVTVSS

SEQ ID NO: 1985 - protein, 118 aa, synthetic construct
QIQLVQSGAEVKKPGSSVKVSCKASGYTFTDYGVIWVRQAPGQGLKWMGWINTYTGEPTYADDLKGRVTFTADESTSTAYMELSSLRSEDTAVYYCARRYGPEDIDYWGQGTTVTVSS

SEQ ID NO: 1986 - protein, 118 aa, synthetic construct
QVQLVQSGAEVKKPGATVKISCKVSGYTFTDYGVIWMQQAPGKGLEWIGWINTYTGEPTYADDLKGRVTLTADTSTDTAYMELSSLRSEDTAVYFCARRYGPEDIDYWGQGTMVTVSS

SEQ ID NO: 1987 - protein, 118 aa, synthetic construct
QIQLVQSGAEVKKPGATVKISCKVSGYTFTDYGVIWMQQAPGKGLEWIGWINTYTGEPTYADDLKGRFTFTADTSTDTAYMELSSLRSEDTAVYFCARRYGPEDIDYWGQGTMVTVSS

SEQ ID NO: 1988 - protein, 118 aa, synthetic construct
QIQLVQSGAEVKKPGATVKISCKVSGYTFTDYGVIWMQQAPGKGLEWIGWINTYTGEPTYADDLKGRFTFTADTSTDTAYLELSSLRSEDTAVYFCARRYGPEDIDYWGQGTMVTVSS

SEQ ID NO: 1989 - protein, 111 aa, synthetic construct; identical to SEQ ID NO: 4

SEQ ID NO: 1990 - protein, 111 aa, synthetic construct
DVVMTQSPLSLPVTLGQPASISCRASESVDNYGISFMSWFQQRPGQSPRRLIYAASHQGSGVPDRFSGSGSGTDFTLKISRVEAEDVGVYYCLQSKEVPWTFGGGTKVEIK

SEQ ID NO: 1991 - protein, 111 aa, synthetic construct
DIVLTQSPLSLPVTLGQPASISCRASESVDNYGISFMSWFQQRPGQSPRLLIYAASHQGSGVPDRFSGSGSGTDFTLKISRVEAEDVGVYYCLQSKEVPWTFGGGTKVEIK

SEQ ID NO: 1992 - protein, 111 aa, synthetic construct
DIVLTQSPLSLPVTLGQPASISCRASESVDNYGISFMSWFQQRPGQSPRLLIYAASHQGSGVPDRFSGSGSGTDFTLKISRVEAEDVGVYFCLQSKEVPWTFGGGTKVEIK

SEQ ID NO: 1993 - protein, 111 aa, synthetic construct
DIVMTQSPLSLPVTLGQPASISCRASESVDNYGISFMSWFQQRPGQSPRLLIYAASHQGSGVPDRFSGSGSGTDFTLKISRVEAEDVGVYYCLQSKEVPWTFGGGTKVEIK

SEQ ID NO: 1994 - protein, 111 aa, synthetic construct
DVVLTQSPLSLPVTLGQPASISCRASESVDNYGISFMSWFQQRPGQSPRLLIYAASHQGSGVPDRFSGSGSGTDFTLKISRVEAEDVGVYYCLQSKEVPWTFGGGTKVEIK

SEQ ID NO: 1995 - protein, 111 aa, synthetic construct
DVVLTQSPLSLPVTLGQPASISCRASESVDNYGISFMSWFQQRPGQSPRRLIYAASHQGSGVPDRFSGSGSGTDFTLKISRVEAEDVGVYYCLQSKEVPWTFGGGTKVEIK

SEQ ID NO: 1996 - protein, 111 aa, synthetic construct
DVVMTQSPLSLPVTLGQPASISCRASESVDNYGISFMSWFQQRPGQSPRLLIYAASHQGSGVPDRFSGSGSGTDFTLKISRVEAEDVGVYYCLQSKEVPWTFGGGTKVEIK

SEQ ID NO: 1997 - protein, 111 aa, synthetic construct
DVVLTQSPLSLPVTLGQPASISCRASESVDNYGISFMSWFQQRPGQSPRLLIYAASHQGSGVPDRFSGSGSGTDFTLKISRVEAEDVGVYFCLQSKEVPWTFGGGTKVEIK

SEQ ID NO: 1998 - protein, 111 aa, synthetic construct
DVVMTQSPLSLPVTLGQPASISCRASESVDNYGISFMSWFQQRPGQSPRLLIYAASHQGSGVPDRFSGSGSGTDFTLKISRVEAEDVGVYFCLQSKEVPWTFGGGTKVEIK

SEQ ID NO: 1999 - protein, 111 aa, synthetic construct
DIELTQSPASLAVSLGQRATISCRASESVDNYGISFMSWYQQKPGQPPKLLIYAASHQGSGIPVRFSGSGSGTDFTLNIHPVEEEDAATYYCLQSKEVPWTFGSGTKLEIK

SEQ ID NO: 2000 - protein, 111 aa, synthetic construct
DIVLTQSPASLAVSLGQRATISCRASESVDNYGISFMSWYQQKPGQPPKLLIYAASHQGSGIPVRFSGSGSGTDFTLNIHPVEEEDAATYYCLQSKEVPWTFGSGTKLEIK

SEQ ID NO: 2001 - protein, 330 aa, synthetic construct
ASTKGPSVFPLAPSSKSTSGGTAALGCLVKDYFPEPVTVSWNSGALTSGVHTFPAVLQSSGLYSLSSVVTVPSSSLGTQTYICNVNHKPSNTKVDKKVEPKSCDKTHTCPPCPAPALAGGPSVFLFPPKPKDTLMISRTPEVTCVVVDVSHEDPEVKFNWYVDGVEVHNAKTKPREEQYNSTYRVVSVLTVLHQDWLNGKEYKCKVSNKALPAPIEKTISKAKGQPREPQVYTLPPSREEMTKNQVSLTCLVKGFYPSDIAVEWESNGQPENNYKTTPPVLDSDGSFFLYSKLTVDKSRWQQGNVFSCSVMHEALHNHYTQKSLSLSPGK

SEQ ID NO: 2002 - protein, 329 aa, synthetic construct
ASTKGPSVFPLAPSSKSTSGGTAALGCLVKDYFPEPVTVSWNSGALTSGVHTFPAVLQSSGLYSLSSVVTVPSSSLGTQTYICNVNHKPSNTKVDKKVEPKSCDKTHTCPPCPAPALAGGPSVFLFPPKPKDTLMISRTPEVTCVVVDVSHEDPEVKFNWYVDGVEVHNAKTKPREEQYNSTYRVVSVLTVLHQDWLNGKEYKCKVSNKALPAPIEKTISKAKGQPREPQVYTLPPSREEMTKNQVSLTCLVKGFYPSDIAVEWESNGQPENNYKTTPPVLDSDGSFFLYSKLTVDKSRWQQGNVFSCSVMHEALHNHYTQKSLSLSPG

SEQ ID NO: 2003 - protein, 329 aa, synthetic construct
ASTKGPSVFPLAPSSKSTSGGTAALGCLVKDYFPEPVTVSWNSGALTSGVHTFPAVLQSSGLYSLSSVVTVPSSSLGTQTYICNVNHKPSNTKVDKKVEPKSCDKTHTCPPCPAPELLGGPSVFLFPPKPKDTLMISRTPEVTCVVVDVSHEDPEVKFNWYVDGVEVHNAKTKPREEQYNSTYRVVSVLTVLHQDWLNGKEYKCKVSNKALPAPIEKTISKAKGQPREPQVYTLPPSREEMTKNQVSLTCLVKGFYPSDIAVEWESNGQPENNYKTTPPVLDSDGSFFLYSKLTVDKSRWQQGNVFSCSVMHEALHNHYTQKSLSLSPG

SEQ ID NO: 2004 - protein, 327 aa, synthetic construct
ASTKGPSVFPLAPCSRSTSESTAALGCLVKDYFPEPVTVSWNSGALTSGVHTFPAVLQSSGLYSLSSVVTVPSSSLGTKTYTCNVDHKPSNTKVDKRVESKYGPPCPPCPAPEFLGGPSVFLFPPKPKDTLMISRTPEVTCVVVDVSQEDPEVQFNWYVDGVEVHNAKTKPREEQFNSTYRVVSVLTVLHQDWLNGKEYKCKVSNKGLPSSIEKTISKAKGQPREPQVYTLPPSQEEMTKNQVSLTCLVKGFYPSDIAVEWESNGQPENNYKTTPPVLDSDGSFFLYSRLTVDKSRWQEGNVFSCSVMHEALHNHYTQKSLSLSLGK

SEQ ID NO: 2005 - protein, 326 aa, synthetic construct
ASTKGPSVFPLAPCSRSTSESTAALGCLVKDYFPEPVTVSWNSGALTSGVHTFPAVLQSSGLYSLSSVVTVPSSSLGTKTYTCNVDHKPSNTKVDKRVESKYGPPCPPCPAPEFLGGPSVFLFPPKPKDTLMISRTPEVTCVVVDVSQEDPEVQFNWYVDGVEVHNAKTKPREEQFNSTYRVVSVLTVLHQDWLNGKEYKCKVSNKGLPSSIEKTISKAKGQPREPQVYTLPPSQEEMTKNQVSLTCLVKGFYPSDIAVEWESNGQPENNYKTTPPVLDSDGSFFLYSRLTVDKSRWQEGNVFSCSVMHEALHNHYTQKSLSLSLG

SEQ ID NO: 2006 - protein, 330 aa, synthetic construct
ASTKGPSVFPLAPSSKSTSGGTAALGCLVKDYFPEPVTVSWNSGALTSGVHTFPAVLQSSGLYSLSSVVTVPSSSLGTQTYICNVNHKPSNTKVDKKVEPKSCDKTHTCPPCPAPELLGGPSVFLFPPKPKDTLMISRTPEVTCVVVDVSHEDPEVKFNWYVDGVEVHNAKTKPREEQYQSTYRVVSVLTVLHQDWLNGKEYKCKVSNKALPAPIEKTISKAKGQPREPQVYTLPPSREEMTKNQVSLTCLVKGFYPSDIAVEWESNGQPENNYKTTPPVLDSDGSFFLYSKLTVDKSRWQQGNVFSCSVMHEALHNHYTQKSLSLSPGK

SEQ ID NO: 2007 - protein, 107 aa, synthetic construct [sequence omitted]

SEQ ID NO: 2008 - protein, 106 aa, synthetic construct
GQPKAAPSVTLFPPSSEELQANKATLVCLISDFYPGAVTVAWKADSSPVKAGVETTTPSKQSNNKYAASSYLSLTPEQWKSHRSYSCQVTHEGSTVEKTVAPTECS

1.-106. (canceled)

107. A polynucleotide or polynucleotides encoding an antibody or antigen-binding fragment thereof that binds to a GDNF Family Receptor Alpha-Like (GFRAL) protein, wherein the antibody or antigen-binding fragment thereof comprises a heavy chain variable region (VH) and a light chain variable region (VL), wherein:
the VH comprises a VH complementarity determining region (CDR) 1, a VH CDR2, and a VH CDR3 from the amino acid sequence of SEQ ID NO:3, and the VL comprises a VL CDR1, a VL CDR2, and a VL CDR3 from the amino acid sequence of SEQ ID NO:4.

108. The polynucleotide or polynucleotides of claim 107, wherein:
(a) the VH CDR1 comprises the amino acid sequence of SEQ ID NO:46, the VH CDR2 comprises the amino acid sequence of SEQ ID NO: 137, the VH CDR3 comprises the amino acid sequence of SEQ ID NO:225, the VL CDR1 comprises the amino acid sequence of SEQ ID NO:301, the VL CDR2 comprises the amino acid sequence of SEQ ID NO:376, and the VL CDR3 comprises the amino acid sequence of SEQ ID NO:426;
(b) the VH CDR1 comprises the amino acid sequence of SEQ ID NO:48, the VH CDR2 comprises the amino acid sequence of SEQ ID NO:137, the VH CDR3 comprises the amino acid sequence of SEQ ID NO:225, the VL CDR1 comprises the amino acid sequence of SEQ ID NO:301, the VL CDR2 comprises the amino acid sequence of SEQ ID NO:376, and the VL CDR3 comprises the amino acid sequence of SEQ ID NO:426;
(c) the VH CDR1 comprises the amino acid sequence of SEQ ID NO:49, the VH CDR2 comprises the amino acid sequence of SEQ ID NO:139, the VH CDR3 comprises the amino acid sequence of SEQ ID NO:227, the VL CDR1 comprises the amino acid sequence of SEQ ID NO:303, the VL CDR2 comprises the amino acid sequence of SEQ ID NO:377, and the VL CDR3 comprises the amino acid sequence of SEQ ID NO:427;
(d) the VH CDR1 comprises the amino acid sequence of SEQ ID NO:47, the VH CDR2 comprises the amino acid sequence of SEQ ID NO: 138, the VH CDR3 comprises the amino acid sequence of SEQ ID NO:226, the VL CDR1 comprises the amino acid sequence of SEQ ID NO:302, the VL CDR2 comprises the amino acid sequence of SEQ ID NO:377, and the VL CDR3 comprises the amino acid sequence of SEQ ID NO:426;
(e) the VH CDR1 comprises the amino acid sequence of SEQ ID NO:50, the VH CDR2 comprises the amino acid sequence of SEQ ID NO: 140, the VH CDR3 comprises the amino acid sequence of SEQ ID NO:228, the VL CDR1 comprises the amino acid sequence of SEQ ID NO:304, the VL CDR2 comprises the amino acid sequence of SEQ ID NO:378, and the VL CDR3 comprises the amino acid sequence of SEQ ID NO:428; or
(f) the VH CDR1 comprises the amino acid sequence of SEQ ID NO:46, the VH CDR2 comprises the amino acid sequence of SEQ ID NO:141, the VH CDR3 comprises the amino acid sequence of SEQ ID NO:225, the VL CDR1 comprises the amino acid sequence of SEQ ID NO:301, the VL CDR2 comprises the amino acid sequence of SEQ ID NO:376, and the VL CDR3 comprises the amino acid sequence of SEQ ID NO:426.

109. The polynucleotide or polynucleotides of claim 107, wherein the VH CDR1 comprises the amino acid sequence of SEQ ID NO:48, the VH CDR2 comprises the amino acid sequence of SEQ ID NO: 137, the VH CDR3 comprises the amino acid sequence of SEQ ID NO:225, the VL CDR1 comprises the amino acid sequence of SEQ ID NO:301, the VL CDR2 comprises the amino acid sequence of SEQ ID NO:376, and the VL CDR3 comprises the amino acid sequence of SEQ ID NO:426.

110. The polynucleotide or polynucleotides of claim 107, wherein the VH comprises an amino acid sequence that has at least 90% sequence identity to the amino acid sequence of SEQ ID NO: 1982 and the VL comprises an amino acid sequence that has at least 90% sequence identity to the amino acid sequence of SEQ ID NO: 1997.

111. The polynucleotide or polynucleotides of claim 107, wherein the VH comprises an amino acid sequence that has at least 95% sequence identity to the amino acid sequence of SEQ ID NO: 1982 and the VL comprises an amino acid sequence that has at least 95% sequence identity to the amino acid sequence of SEQ ID NO: 1997.

112. The polynucleotide or polynucleotides of claim 107, wherein the VH comprises the amino acid sequence of SEQ ID NO: 1982 and the light chain variable region comprises the amino acid sequence of SEQ ID NO: 1997.

113. The polynucleotide or polynucleotides of claim 107, wherein the antibody is a humanized antibody.

114. The polynucleotide or polynucleotides of claim 107, wherein the antibody is an IgG1 antibody.

115. The polynucleotide or polynucleotides of claim 107, wherein the antibody comprises a kappa light chain.

116. The polynucleotide or polynucleotides of claim 114, wherein the antibody comprises a kappa light chain.

117. A vector or vectors comprising the polynucleotide or polynucleotides of claim 107.

118. An isolated cell comprising the polynucleotide or polynucleotides of claim 107.

119. An isolated cell comprising the vector or vectors of claim 117.

120. A method of making an antibody or antigen-binding fragment thereof that binds to a GDNF Family Receptor Alpha-Like (GFRAL) protein, the method comprising:
(a) culturing a cell comprising the polynucleotide or polynucleotides of claim 107 under conditions that promote expression of the antibody or antigen-binding fragment thereof; and
(b) isolating the antibody or antigen-binding fragment thereof.

121. A polynucleotide or polynucleotides encoding an antibody or antigen-binding fragment thereof that binds to a GDNF Family Receptor Alpha-Like (GFRAL) protein, wherein the antibody or antigen-binding fragment thereof comprises a heavy chain variable region (VH) and a light chain variable region (VL), wherein:
(a) the VH comprises a VH complementarity determining region (CDR) 1, a VH CDR2, and a VH CDR3 from the amino acid sequence set forth in SEQ ID NO:7, and the VL comprises a VL CDR1, a VL CDR2, and a VL CDR3 from the amino acid sequence set forth in SEQ ID NO:8;
(b) the VH comprises a VH CDR1, a VH CDR2, and a VH CDR3 from the amino acid sequence set forth in SEQ ID NO: 15, and the VL comprises a VL CDR1, a VL CDR2, and a VL CDR3 from the amino acid sequence set forth in SEQ ID NO:16;
(c) the VH comprises a VH CDR1, a VH CDR2, and a VH CDR3 from the amino acid sequence set forth in SEQ ID NO:1, and the VL comprises a VL CDR1, a VL CDR2, and a VL CDR3 from the amino acid sequence set forth in SEQ ID NO:2;
(d) the VH comprises a VH CDR1, a VH CDR2, and a VH CDR3 from the amino acid sequence set forth in SEQ ID NO: 11, and the VL comprises a VL CDR1, a VL CDR2, and a VL CDR3 from the amino acid sequence set forth in SEQ ID NO:12;
(e) the VH comprises a VH CDR1, a VH CDR2, and a VH CDR3 from the amino acid sequence set forth in SEQ ID NO:21, and the VL comprises a VL CDR1, a VL CDR2, and a VL CDR3 from the amino acid sequence set forth in SEQ ID NO:22;
(f) the VH comprises a VH CDR1, a VH CDR2, and a VH CDR3 from the amino acid sequence set forth in SEQ ID NO:23, and the VL comprises a VL CDR1, a VL CDR2, and a VL CDR3 from the amino acid sequence set forth in SEQ ID NO:24;
(g) the VH comprises a VH CDR1, a VH CDR2, and a VH CDR3 from the amino acid sequence set forth in SEQ ID NO:25, and the VL comprises a VL CDR1, a VL CDR2, and a VL CDR3 from the amino acid sequence set forth in SEQ ID NO:26;
(h) the VH comprises a VH CDR1, a VH CDR2, and a VH CDR3 from the amino acid sequence set forth in SEQ ID NO:37, and the VL comprises a VL CDR1, a VL CDR2, and a VL CDR3 from the amino acid sequence set forth in SEQ ID NO:38; or
(i) the VH comprises a VH CDR1, a VH CDR2, and a VH CDR3 from the amino acid sequence set forth in SEQ ID NO:39, and the VL comprises a VL CDR1, a VL CDR2, and a VL CDR3 from the amino acid sequence set forth in SEQ ID NO:40.
